United States Patent Application Publication US 2021/0254182 A1 - sequence listing, part 8

SEQ ID NO: 92 - DNA, 6830280 bp, Phytopthora sojae (residues 5,122,711-6,830,280 of 6,830,280)
  misc_feature (116850)..(116949): n is a, c, g, or t
  misc_feature (449913)..(450012): n is a, c, g, or t
  misc_feature (684235)..(684398): n is a, c, g, or t
  misc_feature (689322)..(692253): n is a, c, g, or t
  misc_feature (695709)..(695808): n is a, c, g, or t
  misc_feature (704383)..(767052): n is a, c, g, or t
  misc_feature (1090814)..(1100813): n is a, c, g, or t
  misc_feature (1526343)..(1526442): n is a, c, g, or t
  misc_feature (1531123)..(1531743): n is a, c, g, or t
  misc_feature (1538912)..(1547265): n is a, c, g, or t
  misc_feature (1558805)..(1569699): n is a, c, g, or t
  misc_feature (1846672)..(1846771): n is a, c, g, or t
  misc_feature (2060558)..(2064921): n is a, c, g, or t
  misc_feature (2067168)..(2105998): n is a, c, g, or t
  misc_feature (2120976)..(2144287): n is a, c, g, or t
  misc_feature (2152081)..(2153418): n is a, c, g, or t
  misc_feature (2166625)..(2166724): n is a, c, g, or t
  misc_feature (2169618)..(2181259): n is a, c, g, or t
  misc_feature (2189220)..(2189319): n is a, c, g, or t
  misc_feature (2195851)..(2196581): n is a, c, g, or t
  misc_feature (2198717)..(2209061): n is a, c, g, or t
  misc_feature (2211746)..(2249613): n is a, c, g, or t
  misc_feature (2253993)..(2259139): n is a, c, g, or t
  misc_feature (2286108)..(2286207): n is a, c, g, or t
  misc_feature (2293004)..(2293004): n is a, c, g, or t
  misc_feature (2294764)..(2297229): n is a, c, g, or t
  misc_feature (3010972)..(3011071): n is a, c, g, or t
  misc_feature (3016492)..(3016682): n is a, c, g, or t
  misc_feature (3021422)..(3021885): n is a, c, g, or t
  misc_feature (3198681)..(3198780): n is a, c, g, or t
  misc_feature (3358360)..(3364844): n is a, c, g, or t
  misc_feature (3368464)..(3379166): n is a, c, g, or t
  misc_feature (3391216)..(3391315): n is a, c, g, or t
  misc_feature (5160212)..(5160311): n is a, c, g, or t
  misc_feature (5601576)..(5601675): n is a, c, g, or t
  misc_feature (5606896)..(5617696): n is a, c, g, or t
  misc_feature (5623782)..(5642643): n is a, c, g, or t
  misc_feature (5652685)..(5652798): n is a, c, g, or t
  misc_feature (5661179)..(5662574): n is a, c, g, or t
  misc_feature (5897897)..(5897996): n is a, c, g, or t
  misc_feature (6065830)..(6065929): n is a, c, g, or t
  misc_feature (6093671)..(6096991): n is a, c, g, or t
  misc_feature (6116449)..(6117808): n is a, c, g, or t
  misc_feature (6137192)..(6148306): n is a, c, g, or t
  misc_feature (6160785)..(6161254): n is a, c, g, or t
  misc_feature (6186004)..(6186103): n is a, c, g, or t
  misc_feature (6191492)..(6192578): n is a, c, g, or t
  misc_feature (6236919)..(6242523): n is a, c, g, or t
  misc_feature (6247395)..(6257394): n is a, c, g, or t
  misc_feature (6258996)..(6265732): n is a, c, g, or t
  misc_feature (6267174)..(6267508): n is a, c, g, or t
  misc_feature (6272215)..(6366464): n is a, c, g, or t
  misc_feature (6367167)..(6367492): n is a, c, g, or t
  misc_feature (6371823)..(6372269): n is a, c, g, or t
  misc_feature (6380696)..(6380953): n is a, c, g, or t
  misc_feature (6386254)..(6390992): n is a, c, g, or t
  misc_feature (6391939)..(6393915): n is a, c, g, or t
  misc_feature (6657526)..(6657625): n is a, c, g, or t
gaatgtgttcgcctcgtagtaagccaaaatgcgatgccaaaaacgcagccctccccatgagatcatccaaaacgaaaaaagtatcacgaatctgagtgaattgagcctcggactgatagccgtccagcagcgatcccacgccgcgatctgtgtagtttttctttcgtgtcgacgtaggttctgcctggacagtcgacaacagttgcttcaccttatacgtgcgaggatgatcgttagcgttcatcttgttggcgacctgatgattgtataggtctacaatagcgttgacgtagccgtacaccgttgaggcgccaatgactttacccttcttcttcttcgactctctgcctacgacttgggtgtccaaaaagagatgaagcttgctaccagtgaccgtaacaccatcgctaaatcccatcgattggctccactctgcaaactccttttgatagccctcgtacttccgttttgtattaattggtcgactgtcgatagccttctgaagggtggcttgctctcgctcttccatgagcatttgaagtgcactatcattttgacgtgaaaggcgtgcttcctgccgaacaggggtctgtgtctcgcgccgtgctgtcactgaagatgctgcagcataagcgcggatggagatacctgccttcttcttcttcgccatggtgctcttgtgaaaatgtggtttcgataccaaaaataaatattgcgtttaggtcacaagtgtgataatgactcgggtccggacccatcctaagaagcgctgtccgtccgtcacaaaatcgtcacgtttattcactaagtacgattcctactaattccgattagctgccgagcgcacctccatctccgaaggcgaccccctcatacgatattgcggggccgcaggacccgccccggcctctgtagtactaacctaacattgagagtagtgcagcgagccgacgaggcgagcggaacgggtccgccctgccgtagcgaaacgtaggcagtctgctccaatagcggagcgagcatagcgagtgaagcgccaactaactaaaaatccccgccgcgtagcggcggcgctcggctagtataatcaagcagatgatactcattaagtatcgcttgtgatcactcgaaaaattacgactgcatcgtagtgggagcgcaaagggtttaaattaaatatgcgcaaacgacaaaaaacttggcttcctgctgctgcggggtctagcgcttcttgctagctacttgcagagtttggtcgagcgaagaagcgcaacttagcgttggaccagctgagctgaattgaagtgaactgcgcgagacgtgctgccttgttatgcacatggcagataggtgggctttctcgacagcgccagcagcaccatcagcaacgcttggcttctcgatcggtagacgactgacttggttacgaagacgatatcttggtgaggcggtagaagacgtacttgtcctggaaagtagagacggccgtagcgatcggctcgatcagaccctcgtccaggagcgcctgaccgataagcacggcgtcgataagagaggaggcgatgcgcatctctcgcatcacgttgaccgcttccgcgcccaagaagcagcccacgaagcccttgtagaacaaaagtttgttcttgcgttcgaaaactttgtgcagcaccttggccagaacctgcaaggcctcttcagtcacgagtgcgtggacttcatccgtggctgtagcaaagtcgtactcaaccatgtccgatgactcattcgacagcacggattctcggtagttgttggcgttgatagacgtacgtctccgcgtagccgagtccgaggcgaaagcttccgacgtgtcgtcataatccagcaccttggtgaatcggtagaagttgtccttggagttgtggagctggtcgtcggtgcgggacacgtgttcaataaacccaagtcgcaccaacacgtttccatatctcgtagctgtctggtggtcctcagcaaagccactgatcagcatctcgcggacggcgtctcctcccgtaaaggcctccttgtagaagttaaacctcgagtgtcgggtcttgacttccagcgccgaattgaggaagcggcacagtgactggaagaattccttgggcagtccctcgtggaacgaaatattgatactcttgagtctgtccagtcgcgcctccttcaaaggtgccaagtcttcgacggttgagatggagctggcgatggagtggctggtagggtcgtcattaaacgtgtctccgtcttcaacctcctccaagtcgtgatcgtgctggtcatcggtgcctgacctctttgagtccatcaagtcctctcgttccctgtccacgtcgtgctcgccgtcatcgtccaccgagcccgacgaatgggtggtggagttcgtggacctgtccgtccctagcgggtcctccgagagagatgacgcctctgtgctgcggtaactcgaggcgggcgtggaccggccagcgtgctcccctcctagctctgcgatgctggagctgacgcgcgaggggcgcgacggccgctgtgccttcttctcgaactgcttaaagtccacgaggtcctccatggactcgcggatgctcacgatcttgtccagcgcctgcgtggtgcgcgccagcagcgcgcggatctcgtcctgcgacgtgcggcggctgcggatcatgttctggaagctgtcgtcgcgcgccagcatcgggggcggcgagggggcgggcggcagtcccgccatggccttgatgggctcgagcttgggggcgtccgcgtgcagcggcgacggcgacggcgacagcgacggcggcggcttgggcgccggggggagcttggggtcgtgctggagctgctgttcgccgcgggacgaggcacgagagaacttgcgcatatggacgacgaggcgagggctccgcagccgcgagaccgtcctcggcaatggagcgattgacactgaggagagtggcaaaaggactggctttctacgagccagaaaaacctgcggtaatctatatacgaatacatcggtttaccagatggaatcgttataaagaggtgatttgaaattggtttgtattagattattataacggttctcaacaataatatcgaagtaaagaactaggatggcgtctcgtaaggagccacgatttggttctcaggggagaccagaaggatcagagaggaagggcaaagggcacagggcgtagagcgcccagacgatcggcgataaacgctgcggccgctgcgcgagtggacagctagctgtctgctgagcctcgacttcccgatgcaagagagaagctggtgtggcggcaccgtgcaaggccgcgagccgccatcaactgtcgtcaattgactcgctcgtcttgtctgcgcaggtgtgtgatccttccgccctcggctcgagtgtctcgagacggttgagtttcccttttggggcaggcaacaccgcagctttcatcatgcaaatatcctacaacgcaccactcgtatttttcgatgcgcgaaccgcgatgcgttctgcaatgcagcacgcacgttaccgccggattccacttcagctctgaagttcagactcggcaatgcaggcttggtgtggctcccatacacaggcgcgctagcaacgcaagttgtaagcagaaaatccagccgaagccagcgccaaggccgtgtttggtcgtggcagcatttcttgttgggtttggctttggctttgttgagcccgaacgtggaggaggaaacgtccgtcgctggtttcacgggaaatgagctgccgccagttcagtgagtcaatgtgtaacaggtgctgaagccgcagcacttggtgggtgggtgtggatgtcgcccgctcgctcgaagcaacaagtcggtgcaactcatggtcgactggcggaaaggccagcccaaaccaccgaatttatcatgcccaatctagtgtttttcaaaccaaaacccaaaataccctcagccaatcacagtgcgtgataacgttctcggaatgtagccatgtcgggaatcggcgccatctatgcgcaaccaccgccggcactctcctcaccaacgctcgagttcatccgctagacctcctctgtccaggcctctgccaacgcatctctgctgccagccctcgcacttcaacccttttgatcgcaccgtaatcaggtccttgaagttgccgaccatcactctcgccgtcttctccgcagtctgggatactcctcggcattgcagcaacagcccactcaagccaaatgacgtccgagcacacggccgtcgccatctccgaggacggtggcgccggcgagcgcctgcgcatcggcgccgccatgttcgacatcacgggccccgccgccgaggccggcatgttcggctacgccaaggtggggcagctcacctcgggcatccacatgcgactgcgcgctcgagccttcgccttccacgaccccgagtccggcaaccactcggcgtttgtatgcgccgagctcggcctcgtgtccgagtgggtcacgcagacggtcgtggcgcggctcgagacgcacccggagctgccgcggggcgcgtacagccgccagaacgtcatgatcagcgccacccacacgcactgctcgcccggcggtctgtcgcactacttcatctacagcgtccacccgccgctgcacggcgccgacagacagaacttcgagtgtgtcgtctccggcatagtggaggcggtagtgagagcgcacaggaacctccagccagcggtgatcagagtagccacaggaatctgtcttggggcatcggtgaaccggtccacagacgcctacatggccaacccagagcacgaacgagctcagtatgagcacgacacggacaagaccatgacgctgtggaggttcgacgctctggacgggtaccccattgggatgatcaactggttcgcggtgcatcccacgagtatgggcaactggtacacgctgatcacgggggataataaaggatacgcggcctacgagttcgagcgtgagcagggcactaagcacttgatggaccgccccagagcgttcgtcgcggcgttcgctcagagtaacgaaggagatgtgagccccaatatttgtggaccgaggaacccgtgcacggaacacaaggactttgagcggatggtgacagttgcgaatgcgcagcttgactgcgccaggaaattgtatgctgaagcgttggagacgcccgcgattgcgggtggtatcaagttcgcgcatcaatacgtggattactgcagtattcagctccagaaacgctggcaattgaacgccgagtgccccacatcaacgtcatcaggatgtattggggtatcgatggtcagtggcactgagttcgacggacgaggcgtgcctgcagtcaaagaagggatccggtggggaacgtacccgaagtggacaacgctgccggaactccagtcgctgcagaaggagaagccgatcatcttccctacagcgcgctacggcatgtccccgaaagtactgccgctgcaaatgttttccatcgctgactgcctgcacatcgcagcagttccgttcgagatgactacaatggctgggaggcgcctacgagcttcgttggctttatcgcttcacgagttgctgcctggcatcaagagcatccacgagccggtgatcgctggacttagtaacgcttactgcggctacatgacaacgcgagaggaatacgccgtacagagatacgaaggtgcttcaacacacttcggacccaaccagctcgttgctacgtgtcagcaattcgaattgctcgcgacggccatgcacgacaagccttcaaacaagtcagaagagcagacacttgccgtggatggtagtttaccgcccccaagcatcaaggggatgggggtgctagactacaatatcccagtgattcacgacggcgtgttggctggcgtgtcatttggtactgtggttgctggctttgatgccttgaacgcgtatggatggggatccacggtgaaagtgtgtttccacgcagctcacccaaagaataatctgcgaactcaaggcacatttttagaggtgcagcggtggatgtcggacagcagtcgcggtgactctggaggggtctgggttatccatgccgacgacggtgacaccaacaccactttcaaatgggagcgacagggtaccttccgatccgtggtaaccatcgagtggctcattcctgaaaccacacccaagggaaaatatcgtatcaaagtgaatggtgactgcaaacacttcgtctggagaaccgtcaccccgtattcgggcgtgtcgtcggcgttccaggttgttggtcccggtgcacctgcctaacaacacttgaaaagccgaatgcattgcacgtttagattttggagatcagtgccatcatcgatgcacgggtttttcatttgcagagaataatagtgcagcagatcccgcagatgaagcgtggtgaacactgatgtttcagcttgtgtttccctcgaaatagtcggcaggagcaccatgcacaaatagcacctggacatgaaacgcctccgcgggggctcgcgaagttatagcgacgcgttcaatcgctttggctgggagcgtggcgaatcgttgttgctgagtgagcagtaagctgaacaggactttggcgtcgggatggaagaacctgttcctgctgacgaggacagccagcagcagagtgaagtaggtgccgaaggaagcctgaatcctgacagcaagactgctttgagttctccagagacagacaacgatgggttcgacgcagatatgtttgcgtctatgatgaagcaagagcttattgcttacagtgtttcctgggatcctctaatgaaagtactgcaagctctcggtgcgttcatggctaagcagcagcgaacgcagcagggcaacgatgctgccatgaagaagatggaggaccaggtcgctgcccttcgcggtgatctggcacgtgctgaagatgaaaagaaggaggctgcagcagcgatggaagcgatgcaaaatcaagtcggcgagatgcagaaccaattggaagaaattcaaggactagcgccgatagaggaccaagaagagcagcaggggcagcagggcgctaccgatgaccaggataaatcttcggtagaagggccaggtggtgaaaaggatggatcgggtggagtttctccgactgtaaagtctccacgttctccgcgagcgagcagtataggtagacagccattcgtgacggcaaaggagctggatgaagccaaaaaggaactgcaaaaggaaatgaagagggctttggctcacgcatttggccaagatttcatcgatgagggtgacgagaacgaagacggagaatataccctggacgggaatggaactgagggcgagcctgatgcagctggtggatcaaccgatggatcgcctcgaggtcttcaatcccgtcgagcgactgggaaatttcagcttccaggcgcaccatttgcgtccgcggcggaactacaacaagaagttgaaaagctgcaggggctacaagatgcgcttaacgccaaagtggctgagcatgatcagctgctagaagcgttgaatggtcgaatgggtcaactgaatgcgccgtcatcaggtctagaccctgaaaaaggtgccatgggggccaccggtgtgaatgaggcgcagaagaatgaaaagaatgtgaagcaggaagattttgcagcaaccacgaacgacattttgaacgagttgaaagagctgaaggctgtgcaggatgaacacgaccagaaactacgagatcacgacgaggcggttgaaaaacacacagcagatatcaaggctcttgccgatagtctggatgatttgagtgtgcagcagcagactgttgcgtcaatgtatgcgactggtggatctgtgagtgggggaacagaagatggaagtgcgaaggaaaatgcatcgaccgagggttccggaaaatctgacaaaaatgaaagacaagctggtaaacctgtcgaggccatctcccaaccgcacttggatctctcgcttgttttcacgaagctagcggacctacggcggtccactgacgcatcgctaaactcgctacagcaaagtataaagggggtttcagggaccacccagagccagcaagagcagttggatgcactgcgcaacaacgtggtattcaatgagcacctgcaggctcacttggtggaagctcgcttgacaatgcagaaggagctcctggcacgaaaccaaacattccaggatcgcatcaagccgcagcttgttgagtggcgcaaggctcttgaactgacggaggacaaactcttacagggaaactgcgacgacgaaacactgcacgcgctgcagcagatgcagcgctgctaccaccgaacgctactttcaatagccccgctcgtcaactccccgttgagtattgcggagacactgcagacgctctcagacgaagtaaagcagcttcaaaatgcagttcgtttgggggtggtcccgttgcgggttaccgattacaataacgctaacgagaattccgagggtgagcctaacaaggaagaccgtgaagaggaatacacacgcaaactgcggtacctggatgaagagatcgacgcgactctgcaggtaaatatcacgacggagaagaagaatgacccgctgatcaaggggctcgatgcgatgcgcgaaaaggtttgtcatttgtacattgttacgctgtttgtctttgattctcaacccagagctaatgaggctgtgttggcgctccctactgcagcttgaactattgtggtcaatgtggcaccggaacttcaacgctgagcgtggtcaacccagtggtggttcacctgcaagtggtgacttaagcgctagtgccaatgctggtgctgacacccatgctgcacacgacgaacgtcgacacagcttccaccagcgtaaccccgaaagtttacgagagatggagcttcgcctcagcggtgcagtccgacgccttgcgatggtcgaagaagacattgagcgattgaactctttgactgctcacctcaatgcatcggacacaagctttagcaacgctggtacagacggaaccgcacctgttgtcagtcggcgcgcgccttccaccaacaacttgcggacagagcttgtcgtggaggaaatcgagaagttgcgcaaggaaatgtacgcggagattgccaaactctcgacacaatcgctcggcgatggcaacggaggcagcctcaataacagcatcagcagcagcagtctcgtctccgtggaccgacgtagcatggtagaggctgcagccaagcagggcgacgtgctaacggatctctactcgcaaatgacgggacgcgagctcgacaccagactctacaactcagccgaaggccagaagcagttttatgacaacttcatcaaggaagttaccaagaaggtgtccgcgatcatcaatgccgacaagggcggaccgcgcgggcctggcatcggcggcgcggccaacgccaatgtcaactatcgattgctgttggacaactttgcgcagaaggtggacgatcggcttgaggacgctcgtgagtttacaaccgaagagttggctcgactcagaagagagttgatggaacagctgaagattcgctttgaggtggcactgcgtgacattcgtggcgaactcatgctcttacagccgacggatggggactcgacagctatgggcacaaagcccgtcatgtgtgtggcttgtagccggccagtacctgtgtcaacagtcatccgcgaagctggagcactccccggagatgtcgtcaatcccgagccgatcaatccgaccctgccagcagaattcgtaagtcttcgtcgcaaagatcgtcataattgttgtttgcatattttgcggaatactaaccaaaataattttgacgagcaggactacgaacgcccagacgacgagtttgtgttccgtgctgggttcaagatgcccgcaaacgacaggttcgtgcctgttgaaaagctaggatatgtatcctggagctgcgttcgtgctaaccagcctgaaaaatctttcccgatgcaggaaaatattaactctacccttcctgacgactgccatgcgcaacaaaatggtgctcaacaaaccggaggggaaaaggaagcggccaccgcgtcaaagtcatctcaaccgtgtcgataacgttgtccgagaggtaagagattgcaaccgaacattttcgagccacataggtccatcgcagatggcccgttggattgcggctcagcatcctcgcgccgatagcgagcacttcgtattcttgatgctgattgcgtgtttgctatgtgcttgccttgcttggggagacaggctatggaactcgatcgcgcttctcgaggacgcgcctacgacgcgcagtagtgagtacagtacccaacgagcatcaaaagaaaaatacacatgcatacgaaacgacattctgtccttgttgttgtcgcgtggacattctggacattctaccactgtactctgcgatcagcatccaacatgaactacaaagcgatgttgccgccgtgttgcacgacgatgctgtcgcgaactgacaccgtcgagcgctgagcgtgacaacttgaagagccggcggcatggagaacatcctcagctgacgcttgcaatttcaaggacatcaagtaagcctacagctggcggagagccatcagagatccatcaagcgtacgctttccagctgccggatgtgtgccagcttttagctttcctagtcttgctctcttcgctggctttaccgctgggcttacagtatgtacatgatagttctcatacatgtactatcggtaaaaaagattgactacgattcgtgtactgcagcgtgtactgaagcagtgaagtcaagaaagaaaatgtagactcgaaaagctagagcacatccggcatattctagagcgctgtactgtagccaatgccatccactgccgtccagcgtaactacagtggagcaatttgcaagtcgagcagatgacgaggtgcggagaaactggtaaactctggtatgctttgttactgtacacaacatgtgcaaccgacgatcgaactgtagcctcctcgccaccagcggaaaacgtacaaacctccgtccatggtcgcttgcaaattttcatggccgcaatcggcaagatcgtcatgtgtgtaaggtaatacatgtacagtgttacctgcacttcggtggcgccaagtgcatgcacgccagtgtaggtctcccactggcgcgaggatcgagcttcaagcgcgcggccagcttcgtcacacgtgtgtcggaaagcggtgaagcaagcaaccgggctgtccaagagtattgatacgctgagcgtgagtcacgagcgcggcggcactgccgcgttgggccctgctgtacgccgtgcagcagggcccaacgcgtgcagtgcacgcgaggtaagggtcgacacttgaaaaccacctggaatcgcggctcggacaaccaaacggcgagccagcgctgtacgttctcacgaagatgactgccgctgacgcatgtccggcgtgttgctttccgccttcgttctgtgcatttatgctgctcgtccgagtctcgagtccgcatcttcggggccggaccgaaagcgctgaaaggcaccaccaggattagtgcgggaactaatgaggtcactcccgcaagatgcagttcccaatgtcgggtacggtgcactatgataccaccacttgcgggcgggtaattcttgcgtacactacgcagcattggtattgtcctccggagtgggccattcaacgggcaagcatttccactgactcgcgtccaacgtagcgcgtcaaacgatttcggtacatctatcgatcggatacatgtaccgccgcgttgtgtgtgcgcgggacagcgggtgttgtactcagcacgctttgcggcataacagagtttgcatcgatacaacactgcactgtagtgaccgcgcaccgaattgggacgtgcaacgtgagcccagccttttccaagacgaaccatgtcctcctgcgcgctcaatgatggcgtcgagggcggagcttgtcgccaagcgtttgcttgtccgagggatcactcgcgttggcaacaagtcgttgctggtagagaaacagtgctcgcttcaagtctccggtcgatctaggtcgccagctggaggctcggcaccaagtcttcgcggatttgtcaccctgcgctctgtaccgcctgaacgcgataacccggcagatgcgagccgctgcaaatctcgcgtggtctctgcgctctctcgctccatttggttccgtgcgccagtgcgcttgaccgactttgtgcaccgccgccccgccccgaggggagcccttcagtttgcgttttcggcccgaatcgagacagctcgtttgtcagtcgaacggagtcttgctagccgcgcgcggagtgtgtgcggtgcagccagcgacacaatgaacacgatgatggcccccaacttgagccgcgcggacgcgcacgcgatcgcgaggcgcaacgaggcgcccaagcagcagctgcctctccgacgaggccacttcggccgcgtgcgcatgacccgggacgacatgcacaagtacgtggccacagccaagagtctgctggatgacgcgttgaacaaggcaggggaggaccgacaggcgggcaacgccagcctccgcacgtggaagcagctcggctcgcacgccggattcaagcgctgtaccaagttcggggacaacggcagggacctgcactaccgtctgcagggcacggtgcgcgcgtcgctcaacgacctcatgggcatcatgtatgccgactcgacggcgcaggtggtcgagcgccgcgagatgctgtaccacgacagcctggacgcgcagacgctgtgcgtgctcaaggagcgcagcgccgagaacatgcaggagcacatttccatccgctgggaggccatcaacctgagcaacaacagccccatctaccagcgggacatgtgcttcctcgagtacacgggcgtgacctcggacgcggacgggatccccgtcggtttcatgatcaagcactcggtggaccgcaaggagtgcgtctcgctcaaggagtcccacggtctggcgcgtcttgacttaacggaagttgtcctcctgaggccgacgcaggaggccagccacacggagctcatcatggacggagtggtacgacaccccgaaaacctgcccgggtggctcgtgagctccttcctgggtaacgtggcgacgatgctgagcaagctgccgatcattgtgcaggagcggttgctggccaggctgcccatgatcagcgactggcagttcgtgccgcactcgtcgcgcaagaactgccaggtgtgtatgagcaagttcagcatgctgtccaagaagatcaactgccgcagctgcggcgaggtggcgtgcaagtcctgcatcgtgacgcggaccgtgggcgagacgaccaagttctgcaccaagtgcatcctcatggtgtcgagccagagcgaagccatcccgatgtccgagtacggctcggcctccttcattacatcctcgtcctccgatcgcagtcgcagtcgccgcgactcggagacctcggtatcaacgacgtcctcgatgcacggcaagggcggagctctggtggttcctaggatgcgcgtcgatatgaagcttctagaggacgccaaggccagccgcaacaactgcagcgtctcgagcaccgccagcgagacgagcttcagcagctccaactccatcagcatggaccgccgcagcagcgacgcaccccgttatggctcactggatgaggagattgtcactgtggacaccacggagatgacgcgctccaaccggagtatgccgccgacgctggtcagcgcgaatggccagccggtgcctactgtcgaggctgtggaggactcgatcgcgcaccagcggttcctcctgcaggagatgctgtcccaggcgaagacctaccagcagcagtcacgggcctaagaagtgcttctggatctgctttccgattgaagaaaagcacgacggctgcggcgcacgatgaaaatgtgcgccgccaagccagctttagttaattgcgtgtgatagcagtgagagtggatcagtaggaggccttgagtagtttgtcgtgagtatttatgcaataatgaactctatgacttcgttggtgtcgaacgtcttcgcttttctttcaaagtgcatgcacagccttctgcgcgaacgaaaagcgctaatagtccgacgtcaactgcaatagaggcttcaatgttcaagagcattggatagccttccggctggcattcttcgtcatacactacaacgaagtcgaggaatgatagcaaacaaatatagctgcggtttagggaactggaggcttgggaccttattcccgtcgttctggttgaaatgtacccgcgaagcggttagactcggaggaggaaccttcgacgcgaggacggccacgaggcctccgagactcttgctctgaagaaggttgggtgttttaggaagtctggtaacatgctccagcacaacaaaaagagcgcttcggacaacagcagacgcacgtgtagttgactggagggaagcgggagccacacttgtggtcggcgtacacgtcgcgaagggggcagcatcaacttttatccgctacaactacaggcgtgatggcgtactgtggatccgtcggtagcgtcaatgtgctggcaattatgagcacggacctgtttgacgagtctcaagaaaacccgttccttctccaacagcggtctacgtcgccatcgaagctgaagtcggacagctcacggtcaccgcagcgagcgtccttcatcaagggaggtgaactacctctggacgacccgtcaggcacctacggatatcgagaccaacacggaggcttttctccattcaagtcgtcgcagtcagctccagtatcaccccaatacgctccaggtcgcacagtatccttcgcagcccctgcatctgtccctcgaggcattttgaagcggcagtccagctatgaatcggatgcgtcgacggttccttcagttcgagatcaacagcagtcgatgaacccgctcgttacagattccgagctacacaagctcttgtattctctaaaccgtttcgggctggcgaatgaatccggtactgctaacgacccggccagctctccacaagaccggccacttggatccaatccattgtggtttcgaggtaatgcagcatctaccggtggagaatcggaaggaccagacagcggtgatgaatttagtgagctccgggcatcgcgagctggcacgacgcagcggagacgctcaagcaagaagaagtcgtgcgtgctgcgccaagatccaatgggtcgatcgcgaggatccgtcacgttcgcgacggtgaagaatttactgcgcggcggtggccttgcggggcgtacggctctcaagaatacacccgaggtgcagcgcaagaagagtatgggcaccatctcatcacggatgaagatcaagcagaagttcgtgcggccgacgatcctcacggacgcctatcaccgagtgtacgtctacctagccttcctccaatcctgaaacttgctctaacagtgctatgttttgctgcatacaggagcgacatgaagctaggcacaagaccgctgagcgtgtgtatcaagcacgttgcttttcccgagaggtgggaagacgatctttgtgaccgcgaggaagccgacccaggcatgccgcccccgaagggccagctcaagcgcaactccttcatttccctcgagacgctggacaaaatcggcactcgagcagcgtgccccgtgcacctgatcgacgacgagaaaccggattattcgcgtgtaagcgctcgcgtcgacagctacaaccacgttcgcagtcccaaacgcggtcttcgccgcccatcgacttggctcgctggcgctgcgcttgatgcgcgcgtagcttactacgaagatcactaaagggctcgtaacgtattggtggctgtgttgaaccccttcctctacagataaagataatataagcgtgtacctgatccccctgagtcgggcgcaagcattcatctacatgtccagtacctgacgttccgcgattaaaattttaatcaggtggtgcagcttttccggtgatcaaggcccagcgtcaagttgaagtagaccagactcatcagcgttggcatgcatcttggctccgacagacctcgtggtcgcactcgtgtttccaaccgaaacagacagaactttaaagagtaatgtatacaagtgaacaatgcgacgctacgtctcgtcggtcatttgccggactaccaacagttaatcaagcagaccgcccacttcattcgtgggcttgatgcttgctccctcaatagtgcgaggggagacctcgctgccttcatcaatctcctcgtttggtactgctggctcatgcgccccagtcgattcgctggcaaaaacctcctggctcctcgatcgtggtaaacagtgtgcgctttgccctcgcgctcacactcaggtctgctggaccacggcttcctgctgctccatccggtgctgccgaccacggtagctgttgccgtacttaccttcgctgtgcgccatgcacatgccgttgcgctgcgcccacttggagcagccactggggtggccacagcgacgaccaccgccgtgcgagcggcagaagccgtcgccctgcgagctcttggagcatccttccacacggcagcgaacacctccaccgtgagccttgcacataccgcgcgactgcgccgccttcacacagccatcgacagtgcagcgcttgcctcctccgtgggtaatgcacagactgccgctctggctagcgcgcgagcagccctcaacactgcagcggcggcctcctccgtgcgccttgcacagtcctcgcgagcgcgacaagttctggcagccttcagccgtgcacatcttccgtcgcttgcccttggttcctgatccagccgtcggcgtactggcgactcccatggacgacacactgctgagagctgcagccgccgcgagcaccttggcttgactgtctccgtcgtccgagtaggcgctgctgatgctttcctcccgagcacgcagcggccttgccggcagcgtcgtgtacttggtttccatctgtccactagacgacggcagcattcccttattagcggccgaaagatcctgcgagttcaaatcacggcacaaggacgcgatgtcctcgagcagcgggcgaggcccacgtgttgtcacgtacgccgagttcttggggtgttggcgttggtcgtggacgtccggcggcggggtgggcagcagcgcgtcctgcagccgccgcatgtccatgctgttggtgtccatgggcgtcggggtgtccttgttaaagtcgtagggcgacggcaagagcgccacgtcgggcgtcggcgtccggagctggctcatccactcctccatcacggacgaaaagggcgcggagggcgcggccgcggggccgacgggaggctgagccgggctcagtaagttctgcccctgaggtagggcctgagtctgagcctgggcgctgcgcggcggacgcaacggacggatcgtgtcgaccaccggactgcgtcctaccggggtgggcgtgactcccaccgcgggggtcagcggcgtcagcatgccgggggacggcagcgacgatagcgccggggacggagcggagcggaaggagctggaggccactgcggcggacggcaccaggtccggactggggaaagcggcctcgcgcgccgcggcctcgtagtccagaggcgacgggagcgtgacggagggcgccgcaggcgcggcggcggagccgggcgtgaggcgctcatactgcacgacgggcgccggctgcgcggccggcgtgatgcgctcgtacttgacggcggggtagaagctgctgctactgctactgctgctggcgtggtggctgtggctgctgtggctgtgcgtgtacccggaggtggcggcgcccgtggcgttcgcgtacgcgcgcgcgtcggcgccgctcatgcggtggtggctgctgtcgggctcgtccttgcgtttgcggccgatgagcgacagcatctcaaaggggcggcccagcttctctcctaacggcatcgtcgcggcttaacgtgtgtctaggcgtgtgtgcgtgagtgtgtacgagggcttggcttgacttgaggctccgcgcggtgctggtgctggttctcacgaactaaacggagtgctccgggcggcgtgcttcgcgcttttcggaggccttctgaacggaaactgaggcagcgtctgtgattggaggagcggatggggagaacatcaggcgttccagatactaaatccgcgtgtacagattctaaatcgacgaaaagggcaactttttgcgtcgtggtggccggccgcagtggttgacgacagaatgactacgttgctgcgtggttgagttgttgctgttgttgatggtggtggacacgctcgctagtttgcggaagtgtcgtgcatacctacagccgtagatcacttcgttgagtggaggagattttcgattaagcccgactttcgtgttggtcggtgcctccgtctcaactggaacagagacttttgtcaggcaaaaggttgatttgcaccagcctcacgatttcctgccgtacatgacttgcggtgatgaatcccaacgcaagcccttgtttaacgaacaatcatcttgtcgaggtgtaggcgtcctgctggacgcgctcacaacttgccgcgcactatcctcgctggtggatagaagcacttcggcaggcgtcgaaagcgttctgtccgtcaaagttgctggtgcgcaaatcttgtcgatcgacctgtctttgcgggtgcatctggctcgctggccatgggtctgcccgcgagcaccgccgccggctttgcagtcaagtcaagttcctactaggaacacatttggaattccagcccgccacggtgttgtaaatgctcgcatgagacatgccgagaaagcgaaaactgcaactcgaccatcacgtcggcggagtttccgtcgtaggaaacgctcttcgtcacgctgcgactttgcctgtagtgggatggagccggcagtagtagttaggcaagcatgactgcttcggtgaggcgctgcgttggtttatcgtagcgcttctccgaccctcgtttaccatgttgcacttaccggcctcgaggcatcacccaacccttaatcggtgcttcccagattgtaggacctgctgtctctacgagaggtccgaccttaattctaaatctgtattgttctaaactcgagcacgtgttttcgagtattacttgcagacaatcctgctactaacggatacctgacaaatcggatatattgctatatcggatacgaagtcaatccaccgacttggtagttaagacaaatgtatggagcagtgatactactactaatattctactcagagccgataacattaacactactattagtattcgaagaatgtcaaaagtagataccactactaatagcactactatagcactactatagtactgcaattcccactatcggcggctatcctgcgcgcgagtaaaagacgtctgtgccgcattgtaaatggtctgcctactcgatatttgtaatttttgaagtaaccagccggaacacacgttctaggaacgctgttgaacaaccacgccccagctaaacttgagcaagtttagcagctgacaagtaacgccgacaaaggacatcaccatataagtaagtctcataaattcacaacctatacaatgagattcagcagctttgagcacaacagcaagtcaaacacgcatcaggatcaccacacgaaaattgcatttgtatccctgaagtcagcacgagaatgagcacgtctcccggttcacacagcagaaaatatgcatacatacctgctccttgtagttcggcgagcttccacaccatggatgatgcggtcggagatgctgttatctatagtgactctgctcctccggcaatcccaaggttcttgagctcccgcgtcgctgtcagttttaatgagcttgctggggcgcgagcggctgcagaacctgttggtagaagtattagccaagtaagataatgtgtgctggcagctgtaccgttttgagaagtcgacggactactcgaacggtactgcacgatgaagactttgcttccttccacgaaggacagcactcctagcgcgctttaactgcttgttcccccgcccgagtttcgagaaatgaacgagggagcgcaaagcgcgggggctgagaaccaccaattttacgaagatctgacgtgggttgaagttcggatattatcactactactgatactactagtgatttatctcgctactatagcaatatcactactatgacgccctgacccagtgctatagtagtagtggtaatatcactactatagctactactctgctgactactaccaaaccctggtatggagtaaatctgataactgccaaatgcgatacttctccggtccggaaaagaatttacagttcatataatcgaccataattcacgttctactacgccaacagagctgtaattggccttggcgtaaagccctttgtctgctgtatcgcactgattgttttttttaaatgcgttttcccgccattgcggtctgtatcggccagtttaaatggtcgaattttaggtgtgctaggtttaaattcgcagcgttatcaaaaatgatcagatttgaacgtaaaaatactctttagaaagctgaaagaggtcttatgtcgtcataaccaatcgaatcttccaacgcctgataaacagccaatcatgtttgagtttttttccatacaaatcaccaatcataaatcgattgtttcgaggttttttatgaaaaaacctagctgttaattcttttccggaccggagaagtatccgatacaagattggaccaatctgataagagtctagcaagctacaaagaagcttttaatcgaagtttgcgtggtcttcttctctttctcgcgacgtatttgctcctgcacccgtgtctgcagcttgcggaggtcctgtaggaacttttcgtcaaggtcgggatgctcagacagcattgaaataacattccgaactcttgtcgcatgcttgctcgtggttagcaacggcatctcaccctctgtgccaatgctgtcatcgtctgctgcctgaacgcgcggcctactgcaccgccccaagccggaccagcacgtacatgcagagctactgacaatagaagtggttgcgttctgcaggtgggtgttgttacgcattcaagaaagattactcattgattgatggatagtagcacatacccacagttacgtgctcaatcgctctagcgtgcaccctcaggctccagcgaaggtttccccagctttaggtattcgccattttctagcaaaacctcgacttcgtcacttgctgacatatgttatattgactactgctaaccataaaatctgttatgacttcaaattgagtgctttcggcattgagttgaaacactgtccagttgctctccattgaagctttcaacgagtaattactgcttcaggtcttcatcgaaatcctgcgtctttggaaccaaaacaaactgccaactgcttgtaaaacatcaacttgagtcgtcggcctcgtacgagtggcagacgtgcaacagcggcggcgccgtgcccagtataagcggtgtgacggggtcctcgcatgggtttcccttcatggtgttcacgacaccactgtagtcgtccgccttgctgcccagcgccagattgtcgaaggtgtgcgtggatccgagctcgtacttctcggcgccgagcggcgtgtgcttcgtcagtctgcgttgctcctcgccctcccgaagtcggcgatggtggcagctccccctcttcatgaactaattcacagactggaacagtgggaacgccacgacccgcagctcgtccgagttgtcgctgctgtaccccgagctgccgaatctgaagctcacgcggtccacaatcctgtaacgaccaccgctacgctgcacgtgaacacgtaggatgctgcccgccggcagtccctcgcccacgttgacgggtccgcgcggcgacctgttgaagccccctgcacctgaatccagaacatgtggcgcttaccggcgatcagcgccgcgtagctcgagctgcgtgtaacgaggaagagcgtgcgctccgccagcagatccgcctcaaaggcgatgggtgtgcgcgagttcatatccatgtcctcgcgctggcgggcctgcagctgctccttatcgtcgtcttcgctgtgctgctcctggtcctggtcgcgctcttgctggagtagtgagtcgtcgggcgcgagcaacagcagctcgttgttacgagacttcaacggcaggacaaacaagtttggtggctgataggccgttggtaccagttagatgctaatgaataagaagagctctagttgtgagtggttgtgactatgaaggaatcctggaaagtctctgcggagctttctgagattggattgcggccaccgttggtcctccttcgcttacaaggtaagccgcagtagtcactgagtaccgaaagggggtgtttcggcaagcgtgctactgagtgcggtgcgcgcctcatgtccgatgtctgctacgttggcattcagacgccggggagggccaagtactagtctctcgtaggttatgagcccaagacgtgttgttcgggcatcttcttctggacgtggtgtgcagtgatcggagcagtgaaggcgagtgcagtcggcgtctacgacgatggttgagactccacctccgggtggccaggctagccagcagcagccagctggtcagccgcagcaagtgggtcagcagcatcaacagcaagcggcaaacggtggagcgaggacgagacgcgcatgtggctcgaagccaccgaagtacaccgaagatggaggcttcgacctctaccacgctcagatcgaggtatatctgttgcaacacgagtgttgggatgtagttggtggaaacgctgtggctaatgtgaatgacccgcactgggtggagaagaaacaatttgctcgctatgcactgctatttggtatgctgccgaaggactccaagaaggtgtgtaagatggttgcagctcgtgaaatgtggacctctttcgagcaggataagacgaaatgagcttatgccagcgacactcgcctgcgtcgtgacctgtatgtggcgaagtacacgcccggtgaagacatgaagaagtaccttgatcgactcgacgatatgcgacgccggctcgagaacatgaatgaagttgtcacctatgaggaaatggtgaaggtgatcttgcaaggcgtcgtagtttcacatcgcaatgtagttcgcatgttcgatcgcaacaatggtggtgctgcgccagatctggctactgtgaggaatgtcttgcttggtgaagctgagacggacaaagcgtgtcctaccgaagctgccaaagaggaagtcgtgaaggctacgaagctggtggctcaacgtcctgttgctgagaacctgaaaaagaagttcaagaaaggaaagaacaagaaggtgagcggtgaccaggagacccgaaagtgtttcttttgcaagaagaaggggcacttgcgagctgagtgttttggatggaaggcactgtagaagaagaagggtaatgagcctggggagctgaacgatgacggtaatggcagcaagaacgcggctccaatgcggttggtgtggacgggcgagtttggagactctaataacccgccggtgccgatccgcatggtcaagaaccaggctgaggtaccaacggcagcctcggcccatgactggttgctggatagcggggcaggagctcatgcctacgtgcatggaggctcgttcgtgcgaatggtcaaggatccacttgtgactctcgattggcagggaggtgtggacacgaacgagtactcgggtctggtccgtttggaagtgcagcctggcaagttcatgcagttcggtatgcacctggagggacagtcaatttggtcagtcagaggctgcttgaacagaagagctggaagccttcatactctgacacggacaatgagcgcttgcggtgtaagtacttcgacaagggtggagttcgtctcgagtttaagaagaaaggaggcggcttctattggatgaaggcaatccccgtactgacagcttctatgatggttgttcgctcggtggagaccctcgaggacaatatcgtgatgaagtggcacctaaaacttgcgcatctgaatgaagcggccatgaagaagatggagttagacggtttggctgagggcatgaacggacttaccatggacgacttcaagaagacagcactcaagtgcatggcgtgcgaggaagcaaaggcgaagagggtggcgttcaagcgtcaagtcggcaagcgtgctactgagtgcggtgcgcgcctcatgtccgatgtctgctacgttggcattcagacgcgggggaggaccaagtacttccagctgatccaggacgaggcctcccgctacaaatgggtctatttgctcaacaagaagagtgaagctgccgacaatgagatgacgttgattcttcaacttgagaacgactatcccgtgaagatgttttcctgtgatcaaggacgagagtttttgaaccaccgactggctacgttcttttgtgagcatggtgtcaagcccttcaccaccaacgcgtataccccagaggagaactgtttggtggagcagctcaatggaaagctgctgagtaaggtccgtgctattcgagaagccgccaatttgcctgtatgtctttggggtgagatcctgaactacgtcgtgcacatcgacaacatgagtgcaaccaaggctctgacggacatgacgccgtatgagaagttgaatgatcgcaaaccagacatgaagaacgtgaaggtgtgtgagtgcgcggcctactaccatgtcccgaaggagaagcaagcaaacaaattggagatgcgtgctaaacctgcgctcttcttgggcatggcagagtcgacacttgggtatcgtgacacgaggcggtccccagaaaattgccgacgacgtgccgtcacctctgtgacctggagtttgtatggatgctgattggtggatgacttggatacggcgcggctgtacccgtgtgacatggatggcgactgtgggagagaaatgatttctcgggatgaatccagcgtctgaccgcagatgggcccaactggctggaagtgtgaatcctgggagtgcacgcccagaatttcagagaacactcagtccagccgtgggcttcccttacgatgagtacctaaagtctggcggaaagtgtctctggagaatgtatcccagagtacacctcatcttgctgtggctcagagtgccccagaggatcaaattaccctgagaatcaacccactaccaccgtgatcatgcgcaggaggccgctaaacccgctaaaagtgtggctttgtggagatgcacgcaggcctgcaatgtagcagacttgttacccagagtgctgcacggaaacccagagtgccgcacgatgacccagagttcacctccctgagtacaggtgacccagagttccaaagatgattctctgggtttggaccataaatccagactctatactgaacttaagtgtttcccgagccaacacccaagaatccctacagttccccaagattcctcagagttcccaggatttcagaagatgaccctgagtgtcacctgattctcagggattcgagtcagttcgcagtcagtctgcaatcaaagtgatgcgtgaccttgaagaaccgttgtggatgcaaagactggatactttcgaggagtcgagagggagtcctgcaccatactaaaccaagtctaaggacccactattggcactttcggcgccgtgcgacaatggattcgcaagccgatcgcaagtttggaccgctgatcccaaggtatactcaagacaagacattttgaccccaaacatagtgaacagaagatatttgcccgaagaagagagagagagaagtagctgataaaaaccaaacagagttccttttaccctgtactgcgcaagtgacttcggccaagcctgccgacagaaatccggaggacccgagactacgaccgcgggacgctaagggcacatcaacggcgaaggacagccgtctgtgtgggctccatcaaactcaagtccagttaggtggggatcagcgacggccttgagcttcctggggtgatccatctattccatatcctagttgggtcacttgctgtgctcgtggtagcccatttcatattactccagagggtattctggggtgctaggtagtcgcctccaggattttgtattgactgcttgtgtgaagggaaggtaactgatagtgattgtattttcctcctttattggaggtggtgcgcgtttgtgtgagtctcaggggagctaggcccctgaattgcagactcgagtgagcctagtgtgtgtgtgacccaccgtccaagggtccaaaagaataagtgacggctagttgtagtgtttgtatactctgtatttgttggttttatcgagctaggagggcgtttgggtaaggtgtcttctgagttccaagtcccagagttgactgaaatcctggaccctgaattcgtgatattctgggtttcaggggatctgattctctgggtttgccttttgtgtggaggtgcgttctgaagtagacgtgcgctcccgcacttcttcgaggctacattttcaaccggtggagtgccgttccgtcgaagacaaacgagccgacagggattacacaaggtacccacgccaaccaaggagtgtgattctcagggtttaaagctttgcggctgcgaatctctggggtctatcttcttgctgttgactctcaagtcgattctctgggtctacccctggggaacagtcttgggctgcgctatacgaacccccctgggcgataaaggtttcatcggcctcgcctcagctggtgcgcgtgcccggattcgattgtcgaggatttcaccggaatcaagtgttgaagaagtgctgagtgcccgtcaacttcaagctaccaagatgcctggagggcgaggggcgaagaagagtggacgcggtgacggaggacgcggtgaggcgtcacgccagtcgcgtcgtgttcaagatatggagcctgaggagcacaaggacctggaaacagtcgtccgcgacgctcggaaggcgaagaaggctgctcgcgagagcgaggcagtacaaggtggggacgtcgaggcgtctgcagtccaaggtcagcctgctgctggatcgcaaactcaggaggaagaagtttcccctgggctccaaggtttgacggaggtgaattctgggtcgcggattcctgaagtcccagaggagcacacccgcgagggtggtgctcaggcgtctgagggaggcgccaatgcagttgagcccccggaggtgattgacttggtctcatcttcggatgagtctgttgtggaagtgaagtcggagcccgtgcgagcgaaggagaaggcgaagactcagagttccaaggtgaattctgggttcgcaccacctgaacccagagtttcagcgccaagttcgcaagcggcacccaggaaaacgcctgaaagcgacatccgggaagttgctgcgcctgctccggaatcgggagcagcggcgttggacgccgggagcatggtgctgtacgttcgacgtgaagttcgacgctgggaagaggtgaatcctgggaaggtgacgccgccaagtgtcgtttatgagtggccgactccgaaaccagatgccaactcgtacttcgcggccgcgtacgcaacgggaaactacctcaagtggcgtttgtctctggagaatcaagatgaagcctggatctctgagtttcacctcgcccggtggggtgtcggaactgctcaggatcgcatggcgactacgattccccagagtatcatgaccacccgcgagtgcgtcgccattctgcagactctgttcttcgaagccggatttgagtttgtcaatttgatccctggctggtcttcgacgcgtgcttccaggattccagaaagtctggtgcgttctgtcatggaggaacccagaattttatcgctgtggaactggtcgagtggagattggtgatagctggtgtgcctttcaaggtaaactctgaagatcacgccgcaccaagcgcccaagagcaagcaccaagattggactaccacaaggaagatggagacggtgatctattgatgacggactacgatgcggatctactgggccgacagtttgtcctgagattcagagtcactggactcaggatttcacggagcccacgagggtcgagtgatggtgagccacgatccaagcgtactcagcatggaccgcctcggccacaagtcccgtcaacgccatccgcgctgtctacaccgtcgctgtcctctcttccagcgtacaagtcttcgactggtgcatcgcttcagaattccactcccctgaattccatgtccaatggacgtgattctctggaggcggaagccaaggacgctaccccaggcgcggtgccaagtgtcatcggtacctcgcgcgcttcggatgagagtactgcctcgggcgttcaaacgtcttatggtagctcttcgtcttcgtcgatgatgtcgcttggacaacgagttggagctctagcgcttgtggcccagagtgccggtggctttgcagctggcggtggtcttggatttcaggtcacccggacagtcatcccgtcgcgtattgtgtcagtcgaccaagatgacgttgagatggcatcgtcggtgcactctgacccagagatcgcacccaggaaggccggtctctccaggatttcagccacgacttccgagccgaaactcagggtttctgccccgattgctggatttggtggtccaagggatgtcagcgccgatgagcggagtcaacaccagagatctaagagcgaggtgcgctctcgacgctcgacaaaatccagaaaatcatctgcgtcgagccgctcgagtggatccaggaatcttggatcagtttcgtccgtgtccgcgaggtctgggcccgcccaaatcgagctgaacgtcttgcgacaacagcaggagtggcaggcccgcatggaacaggagcaacgcgagtttctcgccagagaacgcctggatgccttggagcgcgagcgcctcagggaacagcgtgacctggacgcgcgtcgccagatccaggaatttacggatcgcttggtccacgctgagatcgcccgaggagaagcggaacggcgggcgcaggacgtggaggatcgtcagacccagagttccactgaaactcaggggatgacccagagtatcacggaagctgtacgtcttgagcgtgagcgcctggatgccgcctacgccgagcgctggcaacagcacgaagccgaagccgactcggagcgcgcgcgctaggtttccgagacctacgccggttggaaggaacaaatgtcaaccatggagcagaaggtccaagaacttgatgcggagaaagagcgagagcgggagtcttccgagaatatccagcgcttccacgccggccaagtgcgcgaccttcgtgcaacattggcccaagttcaagcgcgtcgcgcaaccgtcacccctgatttggcaacaaatgtgaggtcgtcagtggctcagaaccctgaagttgcaacccgaccccaagaatccagtggcgtaatcaacggaaacgcaagtgtcacaggccagagacgggagacagctgatccgaagaacacgcccgaagtcgccgcctcccagctgagagcgaccctcgcgcagaatcgcgcgcgtcaagcggggacatggcgctacggagaccaaggtgacgcagagtgtcaagctcgagcctgtgtctctcgggaagacgtcggatcccaggagaacagcgacctctaaggcctcgcaggactctaaagcagactccaagcgctctgcacccaagaaacaccggtagaagaagaaggaagaagaagcgtcaggatgtcaatccaccctcggactcagacccaagctccgattccagtgatgatgactcgtcctctgagagttcggatgacagttcggacgggaactctggggttaacctgacgacggcctctacggctcaagctggcactacgctcctgacgttcagaccgtacatcaactcgaatactctgggtgagtatactctgggtgagttcgatactaaggcgtcactcagggaacgcgtgcattggtgggagcgttttgcgaacatggcggctcagggaggttggtctaggttggtctacgaagatgcgaattcaggaactcaagttgaaactctcgggagctgcgcgtgactggttcaaccagttgcccaaacacactcagcgtgactggaaggagttggcgtctgcattcaggaagaagtactgcacagcgcgctcgtcgtactctgaacgttacttcacgatggagatgaagaattcagagagcgccctggatttctttcatcgtctgaattccgccgctgggatggctgacattgactttcgcaagtcttcgaagcgcctggagaaacatatccggaggttcatcacgaaactcagggacacgcgcctcaagacgtcgctgcagggccagagattctggagtatcgctgatctagagtacgctctggaacaggacgaagatgtctggagccgcagcgaccatgatgctccgccacccagagttcgtgactttcgtgccgacaacattcctcagggacgtttcaagccgaagcgacaaggacgtgcgtatgtgactaggggcgatgtctctgactctgagtcggacgaagaccctgaaattcacgcgcgtttccaggaaatcacggacgaacccagagcttcagcccgaagtgcgagcgcgaattcagggtcaactcgtgagatctcgggagaagaagcttctacacctagcgctgggagtctggcgagtatgaagggtgccgagtggactcagacgctgacgaacgaggtctatcgcgtgatggataacatgggatggcgtccaccgaacgcccaaccaggaccgaacgcgaaatctggattccgttcccctcgccgcgaaaaccgaattgggacaagttctgcgagaagtgcggcaagggggggcacccagaggaaaactgctggaaagacgtgaagtgtgatcgctgcctggaagtgggtcatccgactcacttgtgtcgcgcgcaaccgtgcgagaactgtggcaaactgcatctcgggaaaccgtgtgaagactggaagacactggaagctgtgaagaaactcacccgccaaggtgcactgaaggacatgccgagtcaaatcctggataaactcctggatggcgaagcaaactctgagaggccgtcaaactaataagcccgctgggtggggacccagtacgcgccgggctgaagaaggcctcagagttatgtatgttggcccggagctgagaacatgaacccaagataaccaacaatgcatgactactctgactcaggatttcatgacttcccctgaaaatcagcatcctgaacaagcgaactctaggtcggtgaactctgaagaaattgtggagtacaagcggacgagagttctcctggataccggtgcgactgtgaatattgtgagcttcgacttagcgcgtaagctcggactcacactcaagtcgcacaagcaaaccaaggtgtctggcatgggaggcgttccgacgtacatcggtgccagtgctccggtgaagattactctcggttcgagggtgatatatctcctggatgtctggattgctaacatcggcgaagggatcgaagttcttctgggtatgagtttcatgtttgcagctggagtgaggatcagtgttcgcgaaggtctcgtgacatttccggatgaagaggcgatcatgatgtgtggatggactccagaggatcgcctgggtgtcgacatgcccgtggaaaccacaggtagttggtatctggcccctggggaatccaacgtggtgaagatttcgtatggactgacgaacccacagcgtgaggttgtgtgggcaggacgaggtgaccgctgggtaacgcacctgatttacgctgcgagatcctggccggtcgccgtgaaggtggtcaacatctcggacaaggacgtctggattcacaacagaacgccagtcgcccgaattgtggagtacggcttcttcccacgtgccggacgctttgtgcgccctggttcgtttgcgtatcgggagtggcagacgcttattctggagagtgttcagtcgcgtgagggcagacttcgggcggaacgcctggctgcgcttgagccatcctgtgtcgagaccccagagtatcagtggcctacgaagattctgccgcgacctgcaaagggccccgacatggcactgcttgcctcgattctcaggaaaccgaagcctcgtcgcgtgcgcttcgctgaagacgctgcaactcagactgaaggagtgcctcctgaagaccctcctgaactccgacacgttgctgttgatacgagtgactagggtgacgttctgaaggaggcggtgaccgatgttgcctcgcagactgtcggaacctcagagggcatgagtcctgaaggtgatacgggcgctgaaaccctgagtttacaggttgaagttggcagtgattctcagggtcagtggtgcgacgaaggtgattctctgggattcgatgtgaatgacgacgattctcagggtgctgttgaagactttactgggatatcccgatctcagggatgccgggaactccgttggagaagctgaagcaggaatatgagcgctgcatgcggctttcgacagaggacctcgactacgagcctgcggtctacatacgtgaaggaagtgagttgctctctcagttgcgtgaccagttggttatgcttcctgagatgcgtgacttgacccctgagtgcaagatcgaggaggcatccctgggaaaacgacgcccgagatggaagaccaagtgaggcgaattctggaatatcatcggaagatcttcttgggagacggcaatgcagctcccccacctgcccgtggagtggtttgtaacctggatgtaggcgacgctaaacctgttgcccagcgtccaaggtccattgcaccacacctgtggactaaggtgtatgaacttctgaagaagcttctggagaacgggctgatcgagacttctacgtccccctgggcatctccgatcgtgatcgtcctcaagaagaatggcgtcgacatccggatgtgcatcgactaccgcgtggtgaatggcttcatcaagctctcacactatccgctggcgtttattgatgatcttttgattggctttgagtcggcgatgtgatttatgagcttagacatggcgagtggtttctgggctatcaagatgaccgagagagccaagttgatctctgcgttcgtctgtccctatgggcactaccagtgggtcaggatgccgtttggcctcaagaacacgccgctgatctaccaggcagttctcaataactgtctgtggggatttcggcggctttcccctgaggaagaagctgaggtcgaccaagatgtcttggactttttggggttgaactctggggaacccagagtttcaggtgaaaatgcaccgcgactttcagtgttgacggatgagatgactgtttttcagcgtaacatcccggctccctctcagatgggccctgtcctgggtcgaagctcgtatatcgacgacatcgcccacggtgcgcccacttgggagcagctgtgccaggatctgaacgcgctgctcttccgactacgttactgaaatgtctctgtgagtcttcccaacagcgaattcgggaagttgtccattccgtacctctctcacgagattagtgctgagggcatccgagcgacccctaaaatcgcgaagggggtccaaaacttgcagttcccgacgacactgaaaggcgtccagagtttcatggggagtctgaattactacaacaagttcattgaagatctacccgtgatcgcggccgttctgtacgagctgactgaggaacaagtgaaatccaggagagacctgtcgagagcccaggaagcctttgaaatcctgaagcgcaagatcgtttcgactccgttgctcagacatccagatcgttcaaggcccttcgtgattattccccacgcgaacccgtgggcagcatccgctgtgttgggccaggagtacgacgggattgtgcacccggttcgattcacaggtcgcgtcttgaatgacgctgagctgccgtatcacattgcggaaaaggaggtgattgctctcctgagagtcctggaggtgtttcgcactgtggttgaaggcagccctaagatcgtcgtctacacgcgatattctgtgttgaagtggttgctgacctcgcagtcggcagacggtcgaacggtgaagtggggtctgaagttgtcccactggaacctggagatacgcagagttcaacgggatgaagacggcttggctgcaattctgggtgcgggtattacccccagagaacacttggatgagatcgctgaaaacctgatcccagctaaggggcgcgttaaacctccagtgcctatcagtatggaaatgctggaaacggactacgaggggtgtattctgagtttcgatggcgccgctaagacttccacgcgacaggggagctgcggctgcatcctatggcatgttcccgggtgggaaatcctggatgcccagggattcaccctggaggacgtgactgtgaacgacgctgagtatcatggacttctgaagggcctcactctggcgattgagcgtggaattcaggacatcgttgtagttggggactccaggattgccatccagcaagcccagggtctcatcaactgcaatcagccaaatctccagaggaagctggccgagtatgaagtgctgaagacgaagttcaagtctgtgcggctggtgcatgtcaagcgagagtttaaccaggccgcagactacctgacgtctaagaccctcgcgcttggtgaatcctggaaggtggaggatgctgacgaacgaacatatctgcagttggtgtccaagattcatgagaagttggtaagaccaaaggtgttattgaacgttggaattcaggggagtgattctcagggtgtcgaaactctgggtatccctggacctgagtgcgctccgttgcctgtggcggccaaagtgtttgcagtaatgactcgggcgcgaactcaggagatcgaagcccaaagcgaacccatgggacctctggagtaccaggcggaacgttggcgacgcatcaaagtgcaccagggcaaagatgatcacctgctgcaactcaaggatttcctgaaaggagacacgacgaagctgtcgcacgctcaagccaggaaactcgcgaaggtcgctgatgatttcgtgttggattccagagaagtcctgtaccgcttgagtcgggctaccagagatcgaccccgagacatggttgacgaactcagactcgtggtgccgaaagctctgcgaccggatatcctgcattacgctcacgaagattttcagggtgggcaccaggggatcacgaagacgtacgagaagctgcgctctgagttctactggcacggcatgtacgctgatgtggaagttttcgtcaaagagtgtgtggattgcgccagcggcaaggggcgccctcagaatccagggccttcccctgggaacatcgaaccgaggcgcccttttgaagttgtgtctatggatttcgcgacacacttgcctaagtcggaccgtgggaacacgttcttgctgctttttcaggatgcgttctcaggattcgtcatgtgtaaacccatgagttccaccacggcgcaagatgtcgctgaagtgtacgaagagcaggtcttcaggagattcggcgcgagctcgatgctgaggcacgaccaagacccaaggttcatgagtgaggtgttcacgcgcttccgtgaacttttgggtagcaagcagcgagccactctagcgtatcgccccctggcgaacggacaacaggagcgttcggtgcagactgtcgtgcgcagcattcgagcgtacattgctgaggcggaccagagtgactgggacgaccatgctgagtgcctgatgtttgccctgaatacatcgttcgatgccactcgcctggacactccgtttttctggtgcacggctgggacgcacacggcacggtgtctgcaatgttaggacccaggccctcgagtatccaggagcgcactgcgtacgaatggcgcaggaagctacagcgtgactatagttatgcacaagcttgcgctgaggagcttcagaaggccaagcgcgtgcgccctgccgaacaaaccaggaagtggagagagccgtccgaacgactgaaggcaggatttgcagccggtgatgttgtgtggctgtatatacccaaagtgcagcccgggctgagccgcaaactggctcacatgtggcatggccccttcagaattcaggaaatccatgacaacttccgcgtgaaactcagggtcgagaacacaggatatcgcgtagatccctgggtacacgtgagccgtttgaaacccagagcactattcccgaagcggcccactgtggagatcgacgtggacggggatgatgactttgatgcggcgctgttgcctgaagacagttgggagcccgacgctgcgaacgatgagtacgaagttgagcgaatcctggatttgcgatggactaaacggactcggacagcgagacgaattcgtgagtaccttgtgaagtggaaggggtatgatgagaccgagtggctgcctgtgtcgaagctcaactgtggtgcccggctctacgaattcaatcaaggcgcaagagcgcgggcccgtttccaggccatgcaggctggagatgatcacccaggattctagcactctggggtgacaatgacccagagttacacgtgatattcaggggaaactctgggtgacactgtgaaactctggggaaaatcgacggaatgtgtgaatattggagacggaaaacgtgaatgtgatttgacttgatttgattatggaaaaggtgatactgctgaggctttggcagtgtgtgagaaggaagatgaaggcggcgagctttacaaggacatggagacagtaaacgaagttggatgacccagagaacaagtcagaaaaatgatgaatttctggggaagacattgaaatcgagatgaagtcctgggtattatggagagttacgctacgacatgtgaaattcagatggttctcgggatttggnnnnnnnnnnnnnnnnnnnnnnnnnnnnnnnnnnnnnnnnnnnnnnnnnnnnnnnnnnnnnnnnnnnnnnnnnnnnnnnnnnnnnnnnnnnnnnnnnnnntgcccgcgctcccagattgcctgtgcgtgcttgtgcatgatgtccacgacgtcctccatcagcttgagcgctttcgcggagagtagctctcgctcatggaagtagaacatttggaagcgaccctgaagcatagtctcccagggttcagaatccaggacttcttggtatgcctcacggtcccagcgctcgtgagcaacgtcgtacgaatacttgtggatctcgtactctgggaacccgggagtctggcaagacgcactcttggtcgaacttggatattgaacaagaaccccatagatgcgccaggaggtctcgttgtcctcagggtcttcggccgtcatcaactcacttgaagtgagctccgagtacgatttccgtgcgagcgtcgacggatgcttggagcgtgatgtagccttggacccctgagtaccactagaaccctgagtggcagaagtgtctgtcttgtttcccgtgcgacgtttcttcttcgacttcgagttggaaccctgaggtttcttgcttgactcagaacgggggcgcttagcgggaggcttgacttccaggggttcttctaccccattgtcgtcctctgcgtcgtcgtcgtcctctgcatcctcgatgtcctccagagtttcaggggcgacctcctcctcctcctcttcagagctattactagaggcgctctcctcaggttcctgggcgggaggctggtagtccgggtcgttctcgatgtcgtccaccgtggaatcggcgtcctcgtcagggtacaccatggggtcatcgaggttcccccagggtggtggcacatcaccgcgtcgaaggcacctgcccagacgctcgcctgctatttcgtagtagacttcagggacgtacttgctccagggagtcaggtcaagacgacaccagtacatcatgctcacgagcatcttgatcagctgcggctgcctgaagtgcccgtgagccgcccggtcgctgccaatccactccatggctgtgtcgtacttgagcccagcaagaatggcctgacgtacgtctggccgaacttccttccagacgacaccccccgggagcatcgtgtgtgcggcctccttggacaccacagtcttctcgctggcgcgacgcacagagtcgcggcctggttggtgatccgtggggcgacactgaactttgtgaggcttagggtgcgccgactgccgtggcgactcgcccggcgccttggaatcccgtgatttccggggtcttgacctttcttggaaccctgaaatttcttggaatcctgagttttgcccccggtcttcgaaccgctgcgaggcttgctgctaggatccgtgagatccagattttcaggacgaccggacgatccagaccccgaagacagaggcatacgtgcgcttttctctgggtacggggccaccgcagccttgcgcttgtccatggccgtgacgttgatgacagtgtcccaggattcgggaggcttcgagcccttgatgcagagcttgaagaggtcgtggaggtgctcccaattacccgtgaagtctgtgtgctcttgaaggaaatcggagaacttccaggggtccacggtggctgactcaggacgcgattttaggattcgcacttgtgcctcaaagtcggcaaggcgcgccttgagttgcgccttctcggactccagagaatcaatctcgtcttgataccgcgtcttctgctcgcccagcgcgactttgtacttggactcagcgtcatccaccttgcccaaggcctcttggacctccaggaaccagtagtcgcacgtgaatttccaggcgcgcttcagttccttgtacttgcgtcgcgtgtcgactacttcctgagtggcggtgaaaccctgctgagagtcagccagagaacgcatgtttcggtaggccccgaggactcgacgcaggtaaccggtcatcttgaacacgcgctcagcgagccttgtgctgttgaagtgacgcaggagtgaggccatctcgcgtcgaataccgatggaattcagggtattgtccagttcgaacgctgaaagaggcgaacgacgtggacacaggacatcgatcccagcgtcggcgccacagacttcattcaacccctgaaggtcctcgtcggagagctcctcgaagccgaccaacgtggtcgcgccgccgtagccttccatggcgaacgcgcccgcgcgaatgtcgttcacgatccctggcacccccacgagatacgcgttggtcttgagattcggcggagccggcagtttccagtgcggggggcgttcagggaccagaaagtcaggggggtcgacctcctcctgccgaagcatgcctgcgaagatgagtcccctgacgtcctctagcgtcgcgtgtcgtggtaacttgaactcaggggcgccctccatgtccacgtctggagccttagactctgtgttcgcgtcaccagtctcctgggttgcagcgtcagtcgaggcgttgccatcggcctcgcgcatgtccgcgtcggaggtcttgccggtggcgctggagaaggagacgcgcttggtcacgcccgtcttggtgctgcccgtcgaagtgtcgccggacgctgagttacccgcctggccgctgccgccgactgttggtgcggtgctcgcaggggcgccgccggtgcgctgctgtgtcggaggtggcgcgctgccggggggcgccgtgccttgagctggcaccgtcgcttgcttgccgtccgaagtcgcgctctccgccatgttgacgatctgcgaaatggctatgtgaccgcgcattgcccgttggagttttgcgtttgagaggagaaccttgaagataggtcctgaccaaccgttgggaagacagggggacgccaaagtgagtgaaaccctgggagtcgacaaagcgcaacggccgtgtcgaagtcgacggtggatggccacaaaacctgtgtgtttttgtggcctggccatggttcaccagttcggagcgatttcctctttgatggacccggaccaggaggggcggttgacacgaggcggtccccagaaaattgccgacgatgtgccgtcacctctgtgacctggagtttgtatcggatgctgattggtggatgacttggatacggcgcggctgtacccgtgtgacatggatggcgactgtgggagagaagtgatttctcgggatgaatccagcgtctgaccgcagatgggcccaactggctggaagtgtgaatcctgggagtgcacgcccagaatttcagagaacactcagtccagccgcggactttcccttacgatgagtggcggaaagtgtctctggagaatgtatcccagagtacacctcatcttgctgtggctcagagtgccccagaggatcaaattaccctgagaatcaacccactaccaccgtgatcatgcgcaggaggccgctaaacccgctaaaagtgtggctttgtggagatgcacgcaggcctgcaatgtagcagacttgttacccagagtgctgcacggaaacccagagtgccgcacgatgacccagagttcacctccctgagtacaggtgacccagagttccaaagatgattctctgggtttggaccataaatccagactctctatactgaacttaagtgtttcccgagccaacacccaagaatccctacagttccccaagattcctcagagttcccaggatttcagaagatgaccctgagtgtcacctgattctcagggattcgagtcagttcacagtcagtctgcaatcaaagtgatgcgtgaccttgaagaaccgttgtggatgcaaagactggatactttcgaggagtcgagagggagtcctgcaccatactaaaccaagtctaaggacccactattggcactttcggcgccgtgcgacaatggattcgcaagccgatcgcaagtttggaccgctgatcccaaggtatactcaaggcaagacattttgaccccaaacatagtgaacagaagatatttgcccgaagaagagagagagagagagaagtagctgataaaaaccaaacagagttccttttaccctgtactgcgcaagtgacttcggccaagcctgccgacggaaatccggaggacccgagactacgaccgcgggacgctaagggcacatcaacggcgaaggacagccgtttgtgtgggctccatcaaactcaagtccagtaaggtggtgaccagcgacggccttgagcttcctggggtgatccatctattccatatcctagttgggtcacttgctgtgctcgtggtagcccatttcatattactccagagggtattctggggtgctaggtagtcgcctccaggattttgtattgactgcttgtgtgaagggaaggtaactgatagtgattgtattttcctccttaattggaggtggtgcgcatttgtgtgagtctcaggggagctaggcccctgaattgcagactcgagtgagcctagtgtgtgtgtgacccaccgtccaggggtccaaaagaataagtgacggctagttgtagtgtttgtatactctgtatttgttggttttatcgagctaggagggcgtttgggtaaggtgtcttctgagttccaagtcccagagttgaccctgaattcgtgatattctgggtttcaggggatctgattctctgggtttgccttttgtgtggaggtgcgttctgaagtagacgtgcgctcccgcacttcttcgaggctacatttccaaccggtggagtgccgttccgtcgaagacaaacgagccgacagggattacacaaggtacccacgccaaccaaggagtgtgattctcagggtttaaagctttgcggctgcgaatctctgggtctatcttcttgctgttgactctcaagtcgattctctgggcctacccttggggaacagtcttgggctgcgctatacgaacccccctgggcgataaaggtttcatcggcctcgcctcaccaacatcttcacactcaccacaggcggcgccttcactcgccccttggccgggattaacgattcggccacctcatctagatgctctctgggcgtgatacccgcacccaggatggcggccaatccgtcctcgtccctttgcaccttccggatgtccaggtcgtaatgtgatagggctacaccccaaggcatcgtgcgaccatccacggtcttcgacttgattacccacttcaggacggagtatctggtatacacaaccagcgggcatccttcgaccagggtcttgaacacttggagcacccgaatgaccgcgagcgcctccttttcggcgatgtgataccggagttcggcatcattcaggacacgccccgtgaaacgtacaggttggatcacgccatcatactcctgtccgaggacggcacatgccgcccactgattcgcatgcgggatgatcacgaaaggcttagtccagtccggatgtctgagcatcggtgtggatacaatcttctttttcaggatgtcaaacgcttccttcgcccgagtcagatctcgaccggcccgaacttagtcgtccgttagctcatacagcaccgcagtgaccacgggaaagtcttcaatgtacttgtggtaatagttcaggcttcccagaaaagattggaaccctttcagggtcttcgggaacggcaagtcctagatacccttcacaatcttcggagtcgctcgaatcccttcagctccgatctcataagacaggtatggaatggtccacttcccgaattcactcttgggcagactgatcgagatgttccagtaccgcagtcggtacaacagcgcgttcaggtcgccacacaattggtcccatgtggcggctccatgtgcgatgtcgtcgatgtaggagctccgccccaggaccgggcccagttggggtggcacaggtatgttgcgcttgaacaccgtcatctggtcagtcagggcgggcagacgtccgtcttccggggcggcttcggcgtcaccatcgtacccagcttctggctgcgaaggatccaatcttaagtaatccaacacatcttgatctaccatagcttcctcctcgggcggcaaccgaacgaatccccacaaacaggtgttgatcacatgttggtagacgagcggagcgtttttcaacccgaatggcatccgtacccactggaaatgcccgaatgggcacacaaatgccgagatgagcttggctctttccgtcatccgaatcgccccaaaaccactcgccatgtccagactcatgaaccacatcgccttctcgaaaccgattagcaagtcatcaatcagaggcagcgggtagctggacagctgaatgaaaccgttcacgactctatagtcgatgcacatccgaatgtcgacaccgttcttcttcaggacgatcacaatcggggaagcccatggcgattcagaatgtttgatcagtcccgtctccaaaagcttcttcaagagttcgtaaaccttccccataagatgtggagccacggatcggggccgttggaccaccggcttcgcgtctccgacgtctaggtcgcacaccacgcctcgggcagacgctggagcggcgtttccgtcacccaggaagattttcctgtggtacttcagaatgtccttcagcttactctcctgggcaggagtactcactccgggctcgcccacgtcggccttgtcaatgtcgcactccggactgagatccggcaattcaggttccaggtccaactcctcagcgctcactctcatgcagcgagcgtattcgatctctagctgcctgagtggggtgctgtccatcgcggacgtaggcaaatccacctcgcattcttcctcgacttcaccttcgagttcagagtccggagctaattccgggctgctcgccgagtatccctccagggtgttgcgtccgagatcaggatcttcattcgacgcttgatcgtccggcacgtctgactcctcgccccagggaatctcctccgcttcttcctgaaacgtaaccttcttcattccggttgagggtaaactctccgctccactcgggtgtttctagagttgcaccatacgaaccattccgtcctctttgtcggaccgggtcatcaacttcgttggccacggatattcgcgtttcaggacggcgggggggggggggggggctgggcaccccaaagacgttccacccggcgctcctcttcatctcgagcccgacgtgagaccgtgttctcatagatcaaccgttccgattcccgatacctgcgcaccccagggcgcacgaaacgccccctactcggaaagtgtccgtactccacaacccgtgcgaccgacgtacgggtatcgatcgacagatcgcggtccgagatgttaaccacgcggaaggccgtaacccaggatctcgctccgtaaattgcctccgtgacccagcggtctccgcgcccgacccaaaccacctctctttgcgggttactcctgccataatgaacgcgcacagtggcgcttccccctgaccggaggtataagtcgtgaggggagacaaccgggatgtccataccgtaacccttccggatcgcgtcaccgtacatgagaatcgtctcttcatcaggaagcataatgactccttcccggatgctgagcctgacgaacattggagaagacgtggacgtgttctccaatgttcgtgacccacaaatccacaacgtacacgattcgaggtcccagagtgatcttcacctgggcgctggaggagatgtaagtcgggacgccacacaatacggacaccttgatctgccgatgtgagctcaacttgagcttgagcctacgcgcaaggttcaaacatatcatgctcactgacgctccggtgtccagcagtatctgcgtcctgaaattctccaccgcgccgtgaaccaacgctattttacgcccttcatcgtcggaatcgtgttcggcccaccaaccatacctctcacccgggcacagcttgaactcggccggctcctcaggttccaagggtggcggtggtctcgaatggtccgcaagttcttgcgtggacgacacaactccatcttcaatcaggcatgacatgcattgttggttatctcggttcttggtcctcaattcggggccgacgtaagctaagacacacaattctgagggtttcctattcccggcgcgtaccgaatccccattcggcgggcttagtggtttaactgcttcccctcagaactggcctcgccattcaggatgtcctcccgcacatggcttggcaggtcagtcaggccttcctcgcgcaccagcttcttgacctcttggaacactctccagtcctcgcatcgtccttcgtgtagttcatcacatttcgggcagggcttcgtctcacacatccgagcaatgtgtccgcggcggttgcagcggtcacaaatcttggtactccaacagttctccggacggtgaccccagcgtcgacattcttcacagaattctcctcgatccgggttggcccggggtggatacgcccgagaaaacggcggcttgggcgactgcgggtttgtcctccggaacgttgcattgggcttctgggagaccatcctgctcgatcgatcgcgcgatacacctcgtggaccaggtcttccttagtcactagggacccggtgctcgcacttggggcgctcacgtcatgaacttcctggatggcgggagtttcggccacgggaccgcggcgctccactgcttcttctgtcccatccgggctgtctggctccgagtcagactctgcggtcaccactaatgctcgatcccggtgcttggaccggaaacggtcccggggaacgttgtccgcgcggaagtcgcgagcctgcgtcgttcgagcgggagggtcatcgccgtggtgcagttcctctcgacacttcaggatgtactccagatctgccaccttcttgaaccggtggctttccacagctgccttggtcggctcgtcgtggaggatccggatgaactggcggatatgcatctcgcgctgcttgctcgacttccggaaatccaccttcgcgtgctccgccgcgatgttcaggcggtacaggaacgccagtgccttctaccccttgcgctgcgtcatcgggtagtagcgctcggtttcggacaccttggacttgcagtactcgcggcggaaggccttggacaacctggtccagtcctggcggtcgtgccgagagagctggcctctccaattcatcgtcgtcccgccttgggtcgtcgccgtcgccacgttggtgggcacctcgccggacgagctgtcggagtcttcatcgcttgagtcctcctcgctcgagtccgagcttgagctgtcgtccgaggggtctccacgtttattcgatcgcttcttgagtgagtccttccgggcagccgttttcttggtctccgaacgagaggaggcagccggcttgggtcccgacttctcgatcgtcgcttgggttgctttcgatggaacaaccctgggcgtcgactcttccctctcatacttaacaccagtcatcggcgccagcgttgcttgaagctgggcagctggaaggtcgccatctggtttggtccgtctatcacttacgtgtccagtgatgacgccactggattattggtacatagtcaggcgcctcgtctcttgcttgacctgaacagtcggatcaggtgcgggtgtcgcttgagctccttgaacctgggatgatgtcgtccgagtgtcgcgcgaacgcgttctccgaacattcccctggtcagggccggccgccttgtccctcgactgggctgcttctagcaaagcgatccttcggtcaaagagcttctgctgttcttccagtaatctccgctgctcttccacggtcttctgcatcctggcctcctgaacttgcagcttcgcggcttcagcttcggaccggaggtgctcttcctgcgcgcgctccgccttcacggtttctcgcgcacgcttcaaggcatcttcctggatagctcccacgacttcgcgggccttcacagccgtcgcctcactcatgatcacctgaactggggcctgtgtgtcgagggcacattggttttccagggcatcctcccggccgaccagcagctgagtggcctggtaggtctggaagattcgcttcccctcgtcagcggcttcgggctcccggtccggggcgttgtccttatcctggagctgttgcttcatctcctgaacactcgcatccacccgagccatggcgtcctgcgtgactcgcatcatggtcagcgctatctcggagattctcgacgcagaggagtgaactgaccatccggacttcacggatcgactgggcgaccgcttcgacttgggcgaccgcttgggacagcgagggtgcttggatcctcggcggccacggcgcctttcatcctccgagctggattcgctggaagaactgcttgggcttgaccttcgggagcgcgtgtgcctccggtacgtcctcgacctgtgaccactccgaatgctagtgtgacccgactccgacatatcgacatcgtcctggttcaccggcactggtggtgtagggagcaccgtctccgtgacttgcacgccccagcctccctgaatgggggctgagccacttcgggcggtcatgaccattccggatggagcggcatgcggcatgtgagcgccggtggctccgccaagctaccacagcgaggatcccgacgacgattatggctccgtcgagcgcgacccggacgtggcgttggggttcgactcctccgaatccgcggccgtcgttccagacagacttgactctcgtcctgaacttcgtcgggaaactgcactctggaagacagacatccgcgtgctcagagcgtccgcatcttgactcgccgggatggaagaccggtaggacaagtgggagctcatggacgggattgacgacggacgtggcgggccatattgcggacgcttggattcagggcggcccacagctgaactcgccggacttcgggtcggccggacttcagcaaccctcatccggaaaagacattctcgaccgagcacgtccatttcccgggtcgacattggcacgtcgtcgtccgggtgttcctccttgaccgcgtccagggcagcatcccccagtgcatgaacgttcagcgctggcatgactcgagttgggacgcccgcagtgactcttcgccattccgaaagttcggcagcgagtagttgctggagctcctacatgagcatccgcaccatgatcggctccacccgggaagcccgtgcttaaaaccactggggaatcaggttgcgaaacctgaatcccgcctcgaagaatagcgtctgcagcagggcggcgcactcgcgcagtgacagcgtggtcatggggatcatggccgcagtggcgtccgcggcagtgcacggagacagtcggaccaagctccaatccgaaatccagttgtcgctcgggtgcatcatcgtcaaacgagccgcaacgtatcgggacgtcgccattgttgaaagtcgggtgtcgggctgggccatgtgtactcaacagtcgtggacatcacgaactcgagcgtcaccctttcccaacggcggacctggtcggccacgaactccttcatccgggcggcggacgcctgctctccggaatcttcgccaggaccaatcaggtcgatgaccatttgggggtcctccgaggtggccaccctgggcggcgcatccggagcggcgttcggaacgggtgagcttggtaacggagtctcgttcggcaggcttgacgccggctcttcctggacggctggtaacggtccttctcccttgatcgtgcgcgcctgcgagggggactcatccgagttgtcgtccagcacgatcacatcttgggccggccgggacgttcccgatggttcatccacagccgacgactcaaccttgacggcgcctcccacagacgcctgggtgggcacatccggaatggacacacccacaacctccacctctgagtccggggtggagttcacttccgagccactcgggggccccttctcttcgtcatccggggtggcagcatccagggacacgtggtgcgcatcctgggcagccgactcgaatccggctgatgttgggcctccgtcgactccttctcctcgcgagaagccttgcgcctcgcggcgtttgtccggcgagcattccgctcgacttcctcgagcgagagctgctcttccggcggcatcccttgagtccgacgcgagcgtcgcacgccatccgggcgtccgccgcgtcccctttcgcgtatgctttcacttccagccataaccccaagagttagtaggttagtagccctcagcaccccttaaagatcctcaatcaatatacaaatctcgatcaaaaccctaggcaaccaaatccgggcacgcgcaccagctgaggcgaggcgggtgaacgcctttatcgtccagggtgtatagcgtacgtccggtaggcttagaccagggagggtttagcttacggaaacccgaaactcacaatgaatataagctccggttgacgtgtgatcttgtgcaatccctataggtgtcgtttatcttcggcggaccgagtttcaaccttgcgaatcgcaattgaccaaagatacaggaatgcagagaacttccgggcgctactcgttccgggagtcctgaatgggaatgagatcacgagcaaagaccttctccaaaataaccaatatcaatacagagtctgtacacacaatatgcagcctgtcaattttaggttgcaccccgaatacaggtaaattcgggatgccccacgcgcaccactcctgaatgccaggagaacaatacaggtaccttcctaccacacgcaatctacaatcgggtcctagggggcgattgccacaacctcctaaaacacagggaatatgaaatgcaagcgcacactgagagtgtacgccacaactgggaaatgaaacaggtgtaccaacccgattgggcagtacttttgggtacctgacttggcttgatgatgtagtgagaagttttcgggggccttggaccaggcgttactcaaagctcgcagcggggctccgaatggtacaccctctcgtgggctccaaggcgatacactctcccgtgggcggcggctgtccttaggcgaatcacgaaccaggcacttgtgcacttgaacacaaaacaaactctgttgatctttatcctcttctctctctctctctctctctctctctctctctttggctatctctctcttcttcgttgtatacttctcttcttcttcgtatggtcttgttacctttagggccgctggattcttcacgcggtctcctctgctcatatcttcatacacttgttcgagttctcttggcttcagtatacccgggcgtcgcgtcgcggcgcacactcatcacttgatgtcggagggactcgtgtgcctgacctagggatctgctgcactgctgacacatcgaactcagactggctcactctccatagtgaagccaagtcacgctcgaaactggcaccttggttgctgacttcgctgacttggcacgttcctgggcgttggtccattggcagatatctgcgatgtcttggggcttctccattcgcctgtggccgcgctcgctttcgggccgtcatggtggcgtcggggccgcgagctgcggctggagcgaagagcgaatcgacgtcatggtccattcgggatggtcggcacttgggcactccgggcgttatccattcaggatgatcatccgccattcggggtagttgcattccattcgagctgtcggttgtccatccaggctgccgtcgactccacgagcttcagtgtccacttggtctcgctgtttgaggtcctcaactcgttgtcgggtcacactcggggtcttcgtagtcgcagtatcctggatgttcgtcttcaacacggtggtggtacaattcagggtgtcgatggcttggtacacttgagtagcttcacactcgggctaccggggattcgaagtaccttgggatgccttggccttgccaagaagggtagctctccgggatacgttcaccggggcacttcacggtctcccttcgtcagactaggtcggggccggactgggtgctgcgcacctccggccagttgaggtcaaacgcgaccaggtatccatactccacatctcctccatcatgctcggacgttccacaggtacaccatcctgaatcgacccttctttcccacgctgtcgctctccctggatcggcgccggggccagctgcgcggacactctccaaaatttcaagtcgccccgtgtcaaccgcccctctggctacggactgacactgaggaaaacaccatcgaagtgtcagaccatgggcagacacccacgagcgcgtctctcgaccttgatcaacatgacccctatctcaaagactagcggccgtacaccctatgagctctggtacaaccgcattccatccatgcagtacatgaaggtgtttgggtgtagcgcgtacgttcatattacagagcaataccgcgacaagctcgatgctcgagcacggctgtgcatgtatctaggcgtccccgaccacaagaagggctatcgcttaatggatctcaactcccatgtcattgtctacagccgagatgccatatttaaggaagacgagtatttttccctggctaacctgacggaaacaccagagctgcctgcgatcgagtcggatcggcgtgtccccacggaatcgattgcctgtacctgcaacgacatcacctgcagctaagcgtcagctaccaccccttagggaggcgctcgacaggacacaaatgcattactcgttccgaacagagacatcttctgaaacgccatcgcctcctactcctaagcgtccccgtgtcatgaccgatgacacggaagtaaccctcaattctgaggaagatttacaggagcaagagcaacgtagaaaactgctctatacactgctagctattcggtatgtaaccgagcccaccacgtatcgagcggctatgaaatcggctcacgctaatcggtggcgtaaagcagctaaagcagaatacaagtcccacatggacaaccaaacttgggttctggtaccccctccgaaaggaaggaagattttaacctgccgatgggtctttgtagtgaaatataccggcacaggcgaaattgaccgcttcaaagcgcgtctagtgatcaaaggattccttcaggaacatgccattgattacaacgagattttctcacctgttatcaggatggaggtactcagactccttcttaccattgcagcgttgcttgatcttgaaatccaccaaatggacgtaaagacagcatttctcaatggtttgctagaggaggacatctacatggctcagccggaaggttttaaagtccccggcaaggagcacctagtgtgcaaactcctaaagggcctgtacggattgaaacaagctccccgtgtattttacaaaacgttgtctgccttccttgaaagcctagggttccacaaactcattaaggacagctgtgagttcaaacgcacatttaatggtgttacatgctacattgttgtgtatgttgacgaccccctgatcattgcgcctataccagccctcgtaaacgcgttgaaatccgccctgaaacagcggttctccatgacagatttaggggaggtgaagtacttactcggctggtctattcaacgtgaccgtaagaaccgaacgagctttatccaccaacacaaatacgctacgaaggtccttgaccgcttcagcgactacattccgtaccctatagcaaccccagcagagcggaacgttaaactctccgtaagcagtcagcctagtagtgaggcagagaaagatgcgatgaaagatattccgtattgcgaagccgtggggagtatcatgtatctcatggtaggcacgagacccgacctggcattctacatgcgtgaggtcagccaattcctagctaatccgggaatggagcactggaaagcagtagttagaggtctgaaatatctattagggactaaggcccacggtcttcttcttggtggatctctcgatgtcacacccgagaacctgggcgacaagctgacagcttacagcgactctgattatgtcaactgccccgacacgaggcggtctgtcggtggatatgtgactatgcttgtgaacagttctatctcatggctttcgcgcaaacaccacacggtggatctctctacaacagaggcagagtacatcgctctgtgtcactgcatgcatgagataattttcctcaaactgctcctcaaagagttaggttttggcacaacgcaagccaatgttattcatgaggacaaccaaagctgcattaaccctttcgcggtaaaaggatacagaaagcgccctttagatgattttccaaaacacggtagagtgtaccccctcttaaagggcgcaccctgtgcccttttccacaagttcaagctagtaatcaaccttcttttaaaacaaatcatatttggtacgcatagtaatcatcatgtaatcattgtctttacaaattcgaagtcatacgcatacattctatgtatcctgcaaatcaccgtaggtggcatgttccatgagacacaccgaaaaggctccgtaactttgtaaaaggacgccaagagcgcccttttagaaggaaatatcaatgagttatatactatattttattgaggacactcgcgaaagggttaagatctgctataacccagaactacacgggaggtcgaagcacattcatgttcgatactgttttgtgcaggaaaaagtcgagcgacacgagttctccgtcgcctactgcaataccaaaactatggttgctgatatatttactaaagctttagacaagcatcagtttagagaactaaggcaaagctcaggatggaatcccttgacgcttaattagccattccgtatagtgtacgagaataacactaatgcatgaagcgtgcctactcaattgcgttcctttagttttttcccactgggttttatcttttgttcgctcaaaggttttctcctcactgaggtttccctggttttgtaccgaattatattaggcatatgactccccatatccatgcagacacaattttttactgggaaatgtattttcgataaggcaaacgtggttcctaattaccttaaagacaatgaaaggtcgaatacaggccacgaaggtaatccagtccatcgccgacgccactggcttgggctccttcaagtcgtagatgcgctgaaccttgcccttcttcctgtcgagtggttagcaagcttgagaggcacttgagcagaagacggtgaaaggaaaagtgaattcaattgagagttatgcaaagctgcctagccgcctacctgcgcgcagccctggagttcgtcctgtgtcttaccttcgtgcagcttgatctctgagacgcctgacctccttgaagtagagaagatggccctagatatgatgacgcggtgtccagtgctactgtcggctgatacttgtgccgcacttcgcttaaagcgtagcacgctccgacactcccactcggcacaaaccaagcctcgtgacgaacaagttgaacttgtcttgaggcagcggcttggtgaacaagtctgcaaccatgaccgccgtcgcgcagtagctgatctgcacaatgtctttctgcacctgctctcgaacccagtggtaccgtagatcaatgttccgcgaacgctgcgagacccctttgccttccgccacatgctgagctgcttgattgtcctcgtggacaattatcttgccgacgtcaaaacccagctcgaaaagcagctgcttgagtccaatacactccttgatgccgtgagctacagcgacgtactcggattcggtagtcgacagcgtgacgatcggctgtttcttggatccccaagcaatacagcacccgttgaggaacacgacgaagcccgttgacgacttccgctccttttcgcaggcaaatgcagcatcgcaatacacctcgagctgcagatcgcgcttgttcgactgtcgatacacgagccccatgtcgacagtagccgactatacggccaatcccgtccttcacggtgcgtgttggctgctcggtctcttgagcaacgagacgtaccgccgtagccaggtcagggcggctcacagtcgatgcgtagagtagtgatccgacggcagggcggaatgtttcgtcgatcaactcggaatcatcgatcacttggcggtggaagttacactccatcggggtgcgcggctgcgacttgtcgtctcggcccatgaagcgcttcaccactgctgtagtaaacttctgctgtgaaatcgtcagcatatcccccatgcgactccatgacagctccattcccacgaagctgctggaagcagtgcactagttgattgcaaatcgacgggtgatcttggcttgaaacgaagccagttccgacgcagcgttgctgaaaatcaacatacaggagaaccaccacaatgccttcagtggtgcacttgactaagacgcacgtgtccgactgacattgcacaaagccagcgtcgcacaagaacttggtcacggtctcataccaagcgcgtgaagcctgcttcaatccatacagggctttacgcaatctccatacctcgtcctcggattcattggtaggcggcgtgacgtagatggcttctgagaggtcactgttcaggaacgcagtttgcacgtccagctgcaggtgctcccaattcagctgcacggcaagagcaaggatagctcgaatggagtcgtgacggacgacggggctgattgtctccgtgtagtccactccaaactgctgcgtgaaacccttcgccactagtctcgccttgtacttgtccaatgagccatctgccagtgtcttgcggcaaaaaaaccatttggtttgcacaggtcgcacattgcctgggcgaaacacttcttcgtatgtgccgttccgcctcagactctccagctcttcgttgatggcttgcctccactgcttggcatccggtcgggacatggcttcctgcagtgtcagcgggtcctgaagctcacttaccagagccagctcctgcgtgttgtgcgactcctcgaactcgagtcttcgcacgctcttcttcttaatgcgagtgctgcgacgcacgacctgcttctccacccgaggatcagcaagggactgccgcgactgctcgctagtagatgatccaccgctttccattgcgatgtcttcttggatggcgtccagaccagtcggcacttgatcgcttgacacctcctgttgcgtcggcgctggcaggtctccgtccagcgtgatagtctactcttcggaatactggactcgaagaacgccgcagtaagagacgcaacgacactcccactgcctccgtgaccactgggcaccaaacggtagcctccgctcttttcgtacccaataaagacgcctttagcagtcttggcgtccagcttctgtcgctgcgatttcggcaacagcacttcagcgtcacagccaaacacgcgcatcttgctcaatacgggggcgtgacccgtcagcacctcaattggcgttttgcccgcgagcactctggacgggcagcggtttcggatgtacgctgcagtcttgacagcgtcgctccagaagcgcttgctcataccagctgcttgtagcatggagcgtgccatctcgacgacaactcggttgctgcgctcaactttgccattctgctgcgggctgtacggcgtgctgaactcttgtgcgatcatgttctcattgctgaattctgcaatctccccgccaatgtactccgcggcgttgtcactcttcagtacagcattgcgcctcttacaccgccactttgagattagcgatgcgctctcgtagagcgcggagttgagtggccgagctcttgtctttcacagggaatactgcagccagatggtacggctcgatcatcatgctcaccatgcccgtgaagccgtctcgcgacgttgtctccattggccccacatagtcaatcgagatcagtacttggccacgttttaggtcgcgtggcttcttcgctggaaatggacgactggccagcttcccagccgcacacccttcatacggtcgcagctgcgtggtggtcgtggctataccgccagccttcaacagcgtcttgagatctcgcgcgtttaggtgtccgagcctggcgtgccagattgccaaatcgtccgatccaccaccagacgcgtagtcggcttcagcacagttgcccgcattgggcgtcgatacgacatacagcccactgctacggcgtgttgcaactagttttgcaccgccgctggagatcacacacagcgcatggtcgaacgtggccgtgagcccggccgccccaaccttgcttaagctgacgaggttgcgctgcagtccaggtacatacagcacgctatccaacgtgcagaaccctccagtaatcagcggcaggtgagcctttccgctgtgaattgtggtcagagtcgtgccgctagcggtcgtaacaacgacgctactggtcatctcgtgcaggttcaaaaggagaccactggtgcccgtcatgtggctcgatgctccagagtcgatgatccagtcagcttcggccgcttgcgtggacacttggaacacaaagcccgcctcggcttcgtcgtcgctgtcctcgcgagcagcggcattgccaaaggctcctccaaattgcttcttcgacttggactcattctcgaagtggccgcgcttcccacagttgtagcacttgcccttctttactcctcgtttcccgtgcgatgaggcagcgaacgcagcgaacgcatttccgctgctgacagcttggctgcccccatgcttgctccgttgactttgcgttgagcggcgtctagcctcagcagccgccttgatgagaagctcctccatcgagccgcacgcttccaacgcaccaatgtagccgttccagtcggggccgagactctgcaagaagttgctcttcttctctgcgtcggacagcgacaccttgtagcaatccaactcggccagcattaggcgagtctgccggatgtgctccagcatgtccccgccggcgtcgatgtacaaggacatgtactgtcgcttgagagctccaacggtcgtatcacacacatgacggtgcgtcctctgcagcgcttgcagcatttcctgcgggtgcgtgagatcggcgaccaacgcggcttggtcgtccgtcagcgcggacaggatgatcgtcatggcgagcttctgctgaagctccagttgatgcagcggccgttctctctgctgtaacggacgatcagcttggccgggctcttcgttcgccagttgcagcgacgtcggtgcaggcttcagcacagcgccccacacgtccttcacttccagatacagctggagttggcgcgcccagacgcgatagcctgagccgtcgaacttgcgaagcttggtcgtgaaggcagtcgtggtattggaactcataacctgtcgagtggttagcaagcttgagaggcacttgagcggaagacggtgaaaggaaaagtgaattcaattgagagttatgcaaagctgcctagccgcctacctgcgcgcagccctggagttcgtcctgtgtcttaccttcgtgcagcttgatctctgagacgcctgacctccttgacgtagagaagatggccctagatatgatgacgcggtgtccagtgctactgtcggctgatacttgtgccgcacttcgcttaaagcgtagcacgctccgacacttcccttggacgcttagcacgaacgcgtgccccactagactgtggtggtaggcaacaacgaagtaaagtccgttgtagagaggcacttcctccagcacacgtgctccacgccgtccagcaatagtgaagttgtccttgtcgatggccttgaagatgaaatcccggccagcatccctgaggcggcgcaggaaccgtagcaccaccttccacgaagtgcccactgtgaggtccacaccatgctctcggagttcatcagccacaaacgtgtcgatatcatcttgcgtgacgatgtccgggcgtccggcaagctcgaccgcacgcttcagtgcattgaacatgcacaggccacgagcgtcagcaccaattgcacgcttgccgaactcgtcgttgggccagaagtccttgaacttctcctcgccggactccttccagcgatccacgaggtccacctcgttggtgaagccacagtccaaaagctgctgaagaggctcccaagtagcgtcggttgacgagcagacggctgagctaaagcacacagtactcttgaccacgaggagaattgcggtggtcgttgatacgggccaccctccaggtcgttttcgtagttgcatagtccgctgttaccgccacctgcttgctgctgtaatacgtaccgtatattgggtaatacacgtcaccatctgacgattcatcagtgtcagaagtgcccagttcgatgactgtatcttcacattcggtggctgcatcctgttcggtggcacgaggtacatgcgtacgtgccgctacacgctggtctgttgcagcagtctgggctctacgagatgccttgccagtcctaccagcagccctcttgaccaccgggtgatgcacgcctccatcgacagcacggcttgcaagttccgttaagatctgagctgcagcctggtcggtggtgcgagatgttgaacccatgtcactaaggtcccccggtatataatgccacgagaacaatgtgccgtggcagcggctacatgctccctcgacgtagcgccactgcgcgagccgcacggcgcaacactgcttgctgcgggcgctgtctccaaagactctgcagcagcctcggccatggctgcttggagggcccctgcgagcggcccaccaacagccttcctcgccttggctccagcggctttcttcagcttcttctccttggcccccgcggccttcgtcaccccggcccccacggcctcacaccctccggtcgccgtggtcgctgcctccacgctggacttggcaccagcaccttggttctccttgcgagcagctgcccgcttccgcttgcgctctcgaatcttagctgcagtgccgagcttccttttctccaggcctttcggcgctgaggacggcgtgcccggcaccagtgctgctgactgcgctgtcttcaagagtgtcgccatggcctgcccgtgaagtccttcttcccaacacagtagggctgagtgggttaagtcggagcagctagctcaggggcttccttggtagacgactctttgaagactgaggcgtttgtaacgagactctccagagacctgtaatattacatgccttcgggtatgtgccaatcatatgcaaagatgcagggaggctgtcaatgtttgcaccctttacatagtggcacatagtaccaactacctctggaagcggatgatctgatacaaaaggtcccttcaaagctgttagtcaaggagtaactatgctgtatagtctgtagcagtgtagttttgctggaaccaaccatctaaactctgctgctggcagtgcaccatctctaatctaactcacttcgtcttttgacgactcctccacactcctctcctcctagtctctccgttaacctcgcaacaccaaatatgtccccgtttgcgtcgtgtttgctacaatcgatgataccgaccaaaatcatcacatctgagtgctaaatacatggctacgctcactttttgtacatgctggctagtgaccgtgccgcggtgcggccagtcagctcattagacagcagtagcaaacaatgcgtaaggtgcacgtacaatcaacttgggtggtagtaaacactcagcctcttccgctgctctgctgtccacggcttgggcgcgctgacgcagagcttgagagcagcatgagtggtgattgggaattgtaccaaaataatggtacgtttcatttgcgctcgacgcaatttgtggagacgaatttgacgtctccacaaattacgacggatttgctacgagaaatacgccacgtttatgaccgtagcaaatatcgagattgtgtgggttttggtagagctccattggtggttcatgtgaactctatgcctccgcagtgtacattgtacacgtgcatttagtgttgatttgacatgccgcaaagctgcttggatttggatctagttgaagttcgacttcaacgtccctcttatgaggacgtcgaggacgtctaatctcttcaagtatgtttttccaccgtttgctgggaattggatcaggctgagttagctatcttaaacttggctcacctgcaggaccaagcgaatatcgcttcaagcagtcggagagccgaggccattggacgttgtacgctacactgtaccgcagcgagatcatgttcgactttgtggtgtgtagaacaaatcgacgtgaaagctcacgcagtgtgagtcacactacggtttttctcaagtgttgattgtcgggctcgaagacctcaggtgtatgggtcctatgtagatcaagtttggcttccaaatgagctaccagcaacagttcacatcgattttttgtcaggagcttccacccctcgattctccatgagcgagaccaactgagctgctagtaaagctatggtgctgcttcacagctttttaaacttcattactctgacacgtagctgcttcaagctgctacatctagcgcgtgcgaataatggtgctgccatctcctgtttagatgtaacgttagcgagtacagataaacctggcgcacccgatagcacccgtggacgacggtcatattgggtatagcaatattatcgggtatgcaagtagggtataaaagtactacagtactaaaatgtattcaagcttgacctccacagtagacaccttttgcccacgtaatttacgccttttcgagcacacgtttccgcacaaaatacgggaaagtcattcggtaaaattgcagaacgacatactgcttatcatgatatacctttggcatataatgtttttatggaaacagtactcaaattaatttatcgagtttcaatagtaattttacgagtcgtacaaatagacggcatgcgcatcaaccgcacgacctcggcagcgccgctgtgcttgtatcgaggtgaagccgaacgaggagtattatgctcacttgtccttgatcatagaagatgaaatttgacgtgttgcagccgtcgttaaaggcaagatcttcccggtcagttggtctaaacatatttttctactgccacacagttattatatagttccatatctgaccgcaagacgatcaaaaactcgttgtaggcctcataaccaacagcttggctctgaacaggcttctgggtatcccatttaatagcatcccttaacgcacttggtgcagaacgtgattttgtgctggatgagctgttcgtcaagcgcgataaagctgacccgcttgtgaatcttgcatgagtagtacacacgcatgacgtacatgctgcagagtagtgtactctgcaaatatgttcgaggttttgacaatacaccaacgatatgtatatattgccaacgcgtccgttgtttgctgctctaagtagtactagggctccgcgaaggctactataggaggattttggtataagaagttttatacttgaaaatgctaatgtttatttctagtgctactacagtccgcctcaatcgttctctttacttcaattcgttcactgctcgaatatacgtactgaattataccagtgtcgtcggttgcacaccggttggacatgcccacgcatataaaccgcatcactggggccataccggtttcaagaaaatataccagttagatgtcaagaggggtcatcgtttgacttgcctgtaccacgatagcagcactaacgtttcttcctatcccagtataagtctacgttcacaccaaaagcccttcaaggaaactgcacgcggtaccggttgtcaaatcgatctttcaagtacgccgtaaggcgtattagctagaaaaaatatttttcaaggagaacagatttggtcctcgtgccagtcagcttttacatttccgagtggctgcatgatgaacggatgaaaatcgtctgactctacgaacacgttaagcttagctgaaatcaatcgcaaacaaggcggaaacgctagtgtttgctgtaaggcggagcttgtgcatagacgatggggttcaagaccctcaccttcttagaacgcgtgacgaaagacccattccgggtagatggagctggtcctggaccgagtgtcaacgctggagcatccacgagagtttcttcatctgtccgatgtacacgtagttcgaggctccccggtgtcaatactgaaggtttttacttttatgttgttgaggttttgcgggaaaacgctcggaatactcaggacgagatcagcaccaacccgacttcctctcgccacctcggacgactccagctacagtgtaaacgcttgattctagcgccaggggccatcaactagagctggaaagctcgcgtggtacttaaccacgctgctggcctcgattccctgtcgaagattgatattcgtacctaattgaatatatgtgggcaaaaagtgtcgttggcaactttacaatttacaaaactcagggaggcatcagaatccgtaaaatacgtgagcaaaaggtgtctaatacaaagctggtgacgacgacaaacacgtactgcagcttggtcatcatttgcaacgcttgggcagcgcccttgggctatggcttagcgcacgagatcgcaaaatggacctgcgcgcttcgctttataagcttatggtgcgcaatcgaagtcatcgtgatttgagttgaaatctagataatcgtcacatgcaaatacccccttgtccgtacaaagatcaatggaagtcttcacgtacgtgttctcggtgcagccttgctacatgcaagcacacgaatagctggtcatgcatctttgccgtgtgcactattccagagtggaggccgattgagacgatatccctctgctcgatctcagagatacctctcgttctgcaagccgtcgttgccacgcgacaaggtttgcctcgcggctgtccagttcgcgacgtcgactctcatactcgttgctctgacgttgaagccgagtccgctctgcagctagttcagcttgttcttgacattctcctctctcgatcatccagtcgctgcatcctagtgcgataaccatccatgcgtggaattatgccactgtcgagatcaagtacggccacagcaaccccctagacttttcttgaagatcccgcgccaagaatgcgtcttgtacgcttgtcggtatacgacagaggagggcggtactggggtctgggacactggaggttgaggagacctggggcgtggggccaagcgcagtagatcgtagagttggtcgaagtgcggcaaccaagcaccaccgtcgcgttaaaaacacagccttcgtaatttaaagggtctgattgtccgaaaatattatatataagtctacaaagtaacgaaccctagagcccatgcataatggaaaatctttaaccctttcgcgatgatcgcgatgatcgtatacctctagtctttatgaatcgcccacgtgaatgttgaccctgtcggcgacgcgtccatcttcgcgcaacctgcgatttcaagtaatttaaactgtaatttattaggtgtgtttttcttgggatatcctgggataaatgattgttagaccgattttacaggacattggcaggacttgataatgagtagatatttgccaatgggagcgaagaaggaagaacaaaccggccaatcagtaactgctctgcttacgccgtttgcgatggcagcagcccagcttagctgtcataccccgcaatgtcgctatgtgttgcggtacgttgatgctgtcagcgcatgcaatgaacgttttaacagcgtcctcaacgctttgacgggcacgccacagtccggtacgctttgctctgtcctcaactatggtcatcagatagcgtacatcattaattttgtaacaggtagcggtgtggtcatgccagacggtgagcaatgtggacgctggagtgctgaacgcggcggtggttatagatcccaagcggcaacgacaaccccaagtggcaacgatgcggacaaccgcacacgaaggatcttcgggctaggtctagcggatatttacccagacgagagcaagtgggggcgccagcagccattgcagcagcgcgcgacgtgctgtccagcgaagacgaactgacggacgttgacgccctggtgaacgacgacgagttgctgttggtcgatgacgagttgttagacgaacgagctgccgggtggggacgagctgtcgggcgagaacgagttcacgcatgaggacgagatgtcggacgatgacgagctgcagaaggacgacgacgagctgcagcaggatgatgaggtgctgacggacgatgccaggctgtcggacgagaacgagctgccggacgaggatgagatgtcgggcgataacaagcagctcggacgagaacgagctgggggtcgagaacaagccgcagaacggcgagggcgagtagcaggacgagaacgagctgctgcttgttgtactgaggttaataaataggggcgtaaatcccgggtgctttgcggtggtccacaggtgttgatacaccaacgctccctagcctcgctgcgaacgcaggggccccgagatgggccttgttggcgatgactcagacaatgaagccgccgtaggagttttggtacactgctcgcgaccggtattgctcttgatctcgctaacttttctcgctagctggtcccaatcgatcgattgaggggggagtaatatggatttttgaatactgacgcgggcaggaaatatgtcaactggcacttttactgactctatactaaatccctgtttatgagttgattatttgtctttgcaaaataccggacacgaagtcctgcatttctaggaatacagagtgtcatgtcctacaatttctggagaatgaaacttttcatttaacccatggctaatcgacacaagccgaattcattttcatctcttcctgcgcgcggagcagcgacgagcacggcagctcactgcagttgcaacacgcaggcatgccggagcaggagctgtccgttctgcgcatctactgaggggacaacgacgagagactcactcctctcaccagcaccagagtcgggctgtgtagtctggacgaagcacgtaggaaggccacttgtcactgagttggaaaaaccaaaagtgagcgagtccagttgtgttgcatcggggaagcccgcaggcgaaaaccccctttcggtactcagtgactactgcggcttaccttgtaagcgaaggaggaccaacggtggccgcaatccaatctcagaaagctccgcagagactttccaggattccttcatagtcacaaccactcacaactacatgtagagatcttcttattcattagcatctaactggtatgacactacaccaacggcctatcgggagaaatgaatgcagccagaaaattggtcctgcaccagacaaaatgtcctgcaaatttaggaccgcttgcaggacgtattcaacgatttctggctaagagacctgcgtgcaccgcgcgccgaagtatcgtggctgaagaatgatcatgacggttttgtttacccaagcgtttgatgcgtcaacaatacggattgatggaggttcggaatgtttaatgctaccgtcaccacaaggaccattttacacagccgacatgatcgttcgttcatacagcagatcggtgtccacttttgtttagtggtgaccacttaacgaaacatgacgggtatgttttgcggcttactacatcactacgcattctcacaacacggtaatacttcagttctactaacttatttgtacaggggcacacaacgtgaaggtgcttcggctgttcatatccagccgaggacaccagtgtcatttcttctggcgcatttgcagcgacacccgtaattggaggcggcccagcagtcttccgcccagggtcaatggcacgcacacttcgcgcttcttggccatgccctcggcgcagaacgtaccgtggccgaaatgcatctccgacgagaatgacgaggaggagcccacagagctgccgtgcggtgtcggtgagcacgttgatgcgatggaggttacgctggtgtgtggcgaaggggagcagctacccccaagcaaccgcgacgccgaagaagtcttggacatggaacgcccccgactcagcgagcgcagcattacggccacgtgcttgcgccccatgccccccgctagcgtatggtaccgtagcccaccattgacgaactcatgccacttcaaagtgtggaagttggaagtgggggtgatggtggatgcaaagcccatgccgccagtattggtgctctcgcttccaccaaacgtcaagtgttccgccacctcatgcagctttcgctgtggcgcgaagacatcttcgcagggaagtgggaagaggaaaccgaactgcacgtgctcagctcgatcaaagagcgccgagtccacggcgtcgatccagtggatagagcggaactcgatacgaaggcggagctcgcacgcgcctggaacgtctttcattctggaagcggcaaacgatccctctgcgcggaggatcatggggttggcgtctgtcgagttggcgttccacaaggcatcttccgccaagagggacgcagaggacgtcttctgcgatgcgagtagcgccacctcgaagcacgctgacactggtttgtggtccgacgaggttacagcctcgcatgaatcatacgagaggcaccggagggaatcctgcatgccagctagcgaactgtagaagacgcggtccgtgtaggacggtactcgatagccgccgtgggttgcgacgagagaataattctgctgaaacgtgtctgcatcgagtggttcgcgcagtgccttccctcggatacggcgaaatgtcgggaagaaattgatctcgttctcctggaagccgtggaaaatctgttgcgagcgacacaactggtagagctcgtcgtgctcctcgaccagtgtccgaagtaagaacggcgccgaactactgccgctgttgcttgctgccgttccagtgcgcgctctgacgtaccggtggctccttcgtgctgtcacaatcggtgtcgggctctgcactttgggagttacgcactgtcgaaagtcgccctcgcccgtttgaggagattgctcgctcctcgacgtttgaagcatagctggcgagcacggcgatgatagacacattgtgtaaatgtcctccggtgtatgatgctgttctgttccagcattcacgagtagctcgagcatctctatcggtgttgcacccttgcgtgtcattcggtagttgaagtcgccgaggataaagctgtggtggtgtagctgggagaacccgaatccgtaatcctcttcgtcaaggtacaattgctgaaggatctccatagcatcttggttgcgccgctgtactttggacggaggctgatgcgcctccatcgtcgcttcttcggacactgaggctttgttacctccactatctccaccgctgctccgtgcaacgcttccaccgtgattaagtaagctgaggtcgccggaggaatcgccattgccgccttttaaaacggagttcgaactcttctttcgtttggcacgcttcaagctggacgagtcggacgccaaatgacacgtcacgaacgcgaaagacgtatcatcgaaccggaacgacatgcccactgcgcctttgttcgacgcacggccgaaaagcaacagggacttcccacgaaagacttcctgagcatttttgttgctgctctgtctgtgcggcatacgaaagcgacccgatgctaccgcggtggctcgtacaaaaatacagagtgcaatgtagccgtgatagcccagcgctgtagctcgtttgccaatttcgcgggagtagtgcacgtatttgctggtagatcccgagacgaggtggcgcaagatcttgatctgtaagtctgcgagatccatgcactcttgcacaccaataacgtagacatcctgtcctaatggaatccagtcgtgctatgacatacatacgaaagcgttagatgccagcgttcttgcgaaaatacctcttcaacctcagcatatttaccagctcatgttcatgaacgtccttttcgcccatgttgaaggtggacgcgaagattgcaatcttctttggctccactggcggtggcggtggtgcatgatgcaacgtaaaccgcttctgtaaacgctgctgccaactccggtacgtgtagctgtgttcatcgtggatcccgaaagccttgcgagaatgggtgttcctactgggatttgagtccccactgtccgactcgtaggatactttgcggcccgacggggtcaatgctgttccgatcctcgcagacgcgcacaccaccgcctcattgtcgtcattcgtccctgtagttcgcttcttgacaacgtatccacctggaatactctcagtcggcgaagatacgctttcggcctcgcaatcacggggcaacggcgcgtctttcgttcttctgcggcagattccaccgtacacgatcgagttggagaatccgttgaggtcttgtatcacctgcatagcgagaccgacgttcacactctcgaggcccccagcctcgaaaactttgcaaaacaatttccacaaagagaacgccacgtcaacgtcgtttctttcgacgcccttcaatagcaggctgcagacttactgcgataaatcatcattggtgtgcggtggacgatgaacacgacaatgtagagcaggagtttacgccgaatcagcatggaagaggtgtctgcctccacggtatcgtgcctgcaacgatagaaaataacagtaacaggcacgccgtccacacacaacaagtcagagcaatacttggatactcaagaccatcgcattcgtaccgagcgacgcgctgcttcatgttgaagtggatgagcgccagcaggacgaagttgaagacgatcatgagcagatagaagaggtagaagttgaggaacatgtagcggatctcgtccaaccagcagtagaacgtcgcgtcgccatacttgttcgctgcaaccaacagcacaaacaacacgcacaaccgcctcacgtcagcaccttccactatacccccacaaataacaatctccctgtgtccctactcattaagtggaagacaacaaaacccgcgccgggcaccactgcaacggccaggaaaagtggaaatcttctttgtcgcgtggcgtccgactcgcctccggcgatccaccggtagaggttgtaggccatgcagcagatccagctgcagctggccagattggcagcttggatcacggcggcctgggttcgacacagcgcgcggtcgtgaatgacgctgcgccccaccgcgcgcgcggccaccgtgaccaggtcgaagagcgccagcacgagcacgagcttgtccatgaagtccatgcgcgcgcgcgggccgcggcgtcggtactgctgcggcagctgcgcctgcgcggccgcgtcctggcgccgcggcttgccgcagccgaagtgcgcgagcacgtacagcgtgccggccaccgacagcgcgcaggacaagtagccggccagctgcagccgcgcctcctccgcatccgagagcgccgcgccgaggcccgcgtcgagggtggcgccgctcatgccagcgaggggcgcgggggttccggggcctggccgtggcgcgtaatgacggtgagcgtcgaggtcttgccggccgagtgccattctggcccgccggcgtggacagccctctatcggtacggagagtgggagcaccggcgtcgcgcgcgctgattggccaggacgttgaagagagtcggaacaagccgagatggatacatccacggcgtccggcgcaaggggccgctccgagcttcctttctcgccggacgcgaccgacgcccgtgttcgttatcgaggcggctgctgacagcggatagcctcgagttggtagtcgcggtggcgtgagacccggcgcgcgacgagagcgcgcctcacgtccggagcaaatcgagtacggcttcgacgttgctgctgggtgacgtgcagtgcagacagtgtggacgctgagtcagtgcggcgactgcaactcgcgtgccggccgaacgggtggctctgtgacagcctttcacgccatagagcccggtcgtcgtactgtggtcggctcgaacagcgcgctgcgatgggggagctataatagtacctgctcagcattgtgcacaacatggcagcagataacacgttggtcaacagcgcttgattcacttacaaggctaagaactagtagcagtgagtctactcgcgagacgacatgcagcgctgccacactggtcgaatttcagttcggtgcgagccgtgcgactgcgtgcagcagacttcacgcttcatccagcttgctctgatcgaatcaaccagagtccagagcgctctgaggtcgctgcgtgtagatagaagaacacatcgacgggatttgggagcgggcttagtccagcacaaagtggccaccgtggcccagtgcgaagttgctgagcgtgtccatgtcggcgtcgtgctcgcggttgatctcgcgcacgaggtccttgatagaaagcatgccggtcaagtcgccgtcgccgttaatgacgggcaggtggcggacgtcctgcacacacacaagcaaacagaaaatccatcgttagaagaagaacactgctggcatcccggtgggttctcgttgcacgtacgctcgagagcatcttcgacatgagctggttcggggtttcgctctccccggcgacaatgagccgggctcggtgcgtcataatctggcccacgagggtgttcttcgcggtgagcccctggagctccaccttcttcaggtagtcgcgctccgtgaccacgcccacgaacttgccgccctcgccgctgacggcgaggcagcccaggttgatgccggccatgcgcgtgatcgcctcgaacacggtggccttctcggggatgatgaagttcacgccgttgtagcacgacttctccatcatgtccttcgcgagccccttggtgtacacactgcggctcgaggcggacagcgcgaaggcgccggcgcgcttggtcagcaggcgggaggcggggatgagggtcatgttgatagcaggcacgaggtgaatggaggtgtgagcggagacagcagagcttctgacttcttgacgtggggctggagtccttcacgatctgatcctgggcggtaaaaataaggatacgtttccccctcaattcgcaccgtttcgatttatatatagacgtttgtatgaatgcaagttagaggggtttctgaagcaccggagtggttgcgacttcaacctcaaggaaggcgaaaggaaacttcagaacatcgacgcgcctacgtgacgctgcagagctcgcgatcttccagcaggaccacacacagagagatgaagtcggggcgggcacccaccgccagcagcagctccaggccggccacccagcgagcgcagcccccaaagcaggactggcggatctcctttgggttctggatcgagctcgatgcgctgtatcacgcgtacccaccgccgccgaagcctcgctgcccggcactgccgcatgactcagccccagaatggtattcgacagctacgaggtcttggtagacgcaatgacgtaacagcggtcgcaattgcactgcaggaagaagagactcgttccggatgacattgagcgatttcttggcaaccccgcggcaactgcttgccttcgtgcggtcactagcaacatccaagctgacgctgttaacgggttcaccaactttatcatcagcgtaggttgtcttgcgactgaaaagtgtgtactgcttgtcatattgacgattgacactgaccagggcgggagtagcatgggcaagtccacatttgcgggcatcctccggaggacgctgctgtccttgacaactgacgtgccttgccggtttgcaactcttaatgctagcggaatagcgtaatgctctttccccgaacatgctgtgtgcgctgtgagcatctgagctaacaactcgtgccgtggtcttttagggaaaaatcgctactaagcaagttagaagacgctgtgaagaggctggacgcttcaaagaccggtgcaccgtcatacctaacaatcgagcacttcgaaaggtactgttagtgagtatctattcatgatctggcttgataaagctaacaatttcttggttgcagcgtgaccccgagcgtacagcagcacttcttcgtgccgctgctcgctgacgcaaacgccaagcgagtttttgtgattttgctcgtgcgtcctgatgcaaacaagctcgcggagcagatcaaagcccaggcaatgaaagtgcatctccacagtctgtctgcgaacctcgtgagaacaaagttgttgctgatttgccagcaagagcgggtgcgaaagtgtttattgcgcgtttaccgcgttgattgaaccatgtctcattcgcgtgttcaaatttgcctctctagattggttatactcgagaagggcttgaagaacttgccaagctctgctctttcaagttgatgccatgcctagagaagatgcatgaaatcttcctcaagcaatatcttataagtgaagcgaacgtggtcaaagtgagtcagccgacatccagcacagctggtcctccggggctgtcacctttcccgctttcaattctgcggatgagtgagcctcttcgccgctgccccaagtgcacactactaccgccatgttcgcacttgccgctggaaaagctgtacgccaagattgaccaagcacgagcttcgtacccagaaaatggaaacaaacgtgtaagcagtatcggtgagtctgggaatgcagcttcggatattgcagccacagctacatcagagcgcgtcatttgtccttcgttcggccggcgtgggatttgcacaaatatccagaaattagggcggtgtcgctacgcacatccgttggatcttcacacgattgatacgaccacactgattccccgatgtcgttctcacaccttgccattaccgtgtgtgcactgcagtaacgccgaacaacagaaggtggatactcgaaaggaacttgcagcttgtgagcaactgaaacgtgaactattacgctgtcgtcaagcacttgcggacctggagactcagcggtacctgttcgctcgcgatcgaggcaaaacagccaagtggggtggcgcaaagaaagcggcggacgagcagcttgcgcgaatggacgcgaaattgaactccgcccatgacaatatcaatcggctagaacaagacttgtcctctcgccaggaaacgctggacaagttgcaagatgcgatcgtccatgggcgcagcaaaggccttggcaagggccacggtcgaattgaaggcaaaccagaggagaaacagcgaactaagtcgactgtcgtcgtagctgtgtaactttcttactacaacatttaacccctttaacctccgttactcgatgggttacctgatacgaattgcagctggcgcgggtccgcaccattccgttgctgctgcagttggcgctgtgctcgagcatccgcccgctttttctgctcgagagccaatgcatcggcgaattcgtgcaacggaagaccatgcggatcaaatacatccggggggaaattggactgcagctcgtcgatgccgaaatactcgaccaccttttccaggatgtacgggttgcgcacctccttcttgtcctgcagcgtcgtctggaagtcctggccgcgttctcgctggacgcgcaggaaccgctcgatgcgttgttgcgtctcgtcgtcatcggctagaggcgtggctgccggcggtatgccagcacgcaaaagcattgcctcgtcgtctccgtcgtccataggcgcgtccggtccagtggtcactgcagttgatacattggcatcgacagtgttttcggcaggcttggctggtaattcgtcggatttagcggcggtttgcgctactggggcttcgactgtagatggagcaggagcagcaacgactgaagattcaaccttggccggtggggcggtgcgtgcacggtcgtcctcctcgtccgacgacgatgagccgtactcgagtcccagcaagttcatcgttgtttgttatttgcgtgcaccacacaacgaccactcttaaatgtagccatgtgcacgaaacgacgcgagcaatagcatgacattatctctccgccatggcgctcgatcggatgcgcgagcagcgcgcgatgaagctgctggacgcgcttcaagacgacctgcgagctcaaatgcggcttgagaaggacgagttgggtcggaatggcgagaacaagagagctagtgtgcgacggaaggcgaggatcgctcgactttcggacccaaacgagcgcgagcggatctggagtcgcgaacaattaccttcgtacgaggtggaacatgcaataccgacgagtataccgacgagtggaatatgttttctgagtaaactcacagtttctctgtgtttgtgaaaagggtgttgcaattcgcagtcttccgaagaagcgcgagttctggcgtgaagtcgacgtgtctgtatggcgcaaggccgagttggacgctgcatgcacattgctcgatctccctgtaagcggcaagaaattggaactcgttgctcgcatccaggactgggtccatgagcctgaaattctcgctcgtctggaagagcagcggctgcttgagctgcaacaagacgcgattttaggtcagtggatgtgtactcgccagcaacaacatctgctaacatttgatgttgtctgatgttctcaagcttctgggcgggtgtttgcgttcggggccaattccaacggagagttaggtttgggccaccgccgtgcctgcgaaataccaacggaaatcgaaagctttcgaggtggccacgtcactcacgtttacacagtaagtaccctggactcgtgactgggtgccgttgtgcgtaacctctttggtatcattgccactacagggctttgatgccaacttcgcgtttgcccgaaccgaagatggccaagtgttcgcatggggcggtgctgggcatgccattttcgacgaggccgctacgaagcctgacagagcgaaagctcagcagcaagagcaagaagatcaacacaagcgcaactcggagaccgagaactcagcttgtggtgaaggtcgtggttcatgcttcttgtttcctagattgatttcgagcataaccaacaaacgcgtggtacatcttgcttgcggtcgaacaaatggacatatcgcgatgacaagcgacaaaggagaatgcttcacatggggaagaggagagtatggcgagttgggagcgtctgagtatggtagtaagcccaccacagaagagccgatacgcgtcgaaacattgtgcaagtttcacgtggctactgtgagcgtgggcaacacgcacaccgcagctatcacggacaaaggaaaggtatacgcgtggggtagttgctggagcggtcagctcgggttgggagaggcaaaacgtgcgggagtcaaagacaaacgtttgcagctatgctttccgattcctactattgtcgaagcacttcaacacaaacggatcacgcgagtctcctgcggagctgtgcataccgctgtggtgtccgcagacggacagctcttcaccttcggttgtggcgatggagggcgattgggactcggtagcaacgaggattcgttccacccgcagttagtaagcgcgctggagaagtgtgtagtgctggatgtgtgttgcggcagttggcatacgctctgtatcgcccgtgatcgagacgaaatatttccagttcgagcgcctcgaagggtcctaggctcacccgcttcaaccagcagcgatagcaccggcggcttcgtgtacagcttcgggagcggtcttcaaggacaggtcagtctcgaaaagctagtgttgcgtctcacagccgtgtctctcttgctgacagcctagtgagttgatgtactgcgtagcttggcctgggaaagcagaagctcgcggctctaccaagtacgttcaccgctcttccgtcatagctcttcacctcactgacaccagcgttttctcaattgcagcctgcattccagcgctgcggcatcgccacgttcgctgccgctctatcgcctcatcttcccaccacagctgcgccttggctgtcgacggcaacctgtacacgtggggccagaccgcctcgggctgcctgggacggaagggctccgaggtcggcgcgacggatctgcccgatccgggcgtcgtggaccgcggcagcttccgcaactacggcgtggggcccatcgtctccatcgcggcggggcacggcttcacgttgttcgccacgggcccctgggactcccaggctgggagccgcgcgaagcagcagttccagctgcagacgaccgtcaaccgcaggcctggagttgaagcaggtgccacgccacaggaaaaatcatagagggtcctagagggagcatacaaaaaccaagtgacaaccttgaaatccccgtccacgcacaggattggacaaacaccaaagtacgtttggtttggtcttggctcggctcacttccacttccgccgcctcctcgtcagatcgatccatcgcgaccgccacgatgcagagcgccccgtcctcgtcgcagggcaacatggtcgacacgggcgtgtaccgctacgagcgcaatcgcgcgagccacgagttcttctcgccggggccacacgccaccacgcgcacggccacggcgccgtcagccatcttcaacctcgtgagcaccatcatcggcggcggcatcctgtcgctgcccttcgccttcgacaagtgcggcatcgtggtggcgctcgtgttcatggtcatcgccgcctccgcctccaccttcagcctctacgtgatcgtcagctgcagccgccgcggacgcgccgcctcctacgaagaagtcgtgcgcaaggcgctcggcgctcgggccggccgcgtcaccgtcgtgctgctcgtgctgctcacgttcctcacgctcgtggcgtacgtcatcctcaccaaggacctggtgggctctctgggcgcgcgcttcctctacaaccggccggtcaccgaggcggagcagaacgtcctgacgatttgctgcgtgctgctcgtgtcgccggcgctgctggcgcgctctatggacgcgctgcgcttcacctccatcttcagcctcgtgtcggtgttggtgctggccatcgccattacggtccgagccgtgggcacgacgttcaagcgtgaagaaaccattgaagtcgaggcagagccgcagatccccatcaagatggtccccgacagctgggcagacgccgcctacgccttccccatcatctccgtgtcgttcctctgccacttcaacgtgctgccggtgtatcgcgagctgcacaagcccacgcgccaccgtctcaaaaagatcgtggcgtcgacgatgttctcgacgtggctgttctacatcctcgtcggaatcatgggctacctctttgcgttccggcagcagggcggcgtccaaggtgacattctcaacaacttcagcgacaacgacccgctggtgaacctcggacgcctcggtctgctggtcaccattcagctgagcttgccgctgatcatccagccttgccgcgccaacctgctccggctggccaaaatcatccgcagcttcatccgcggccgtgccaaagtttacgatgccccggactcttccgactcggataacgaagaagaggctcctgcaggagaggggactgcgctgctgcctaccagcgccaatggaaccagcatcatcaatgccgcgtcctcatctccacggagactcaagtcgaccgtcgtgcacgtgctgctcactgttgccatcatggccagtgtcatcacgatcgcgctgctgtcacccggcgtggctgttgtgtggaacctcatgggctccaccgttggcctcctgatctcgtacgtcctgccgtgcgtgtcctacgtgtgcattaggcgcgagaagcccaacacggaccgtcgcaagctcactgcctggatcatcctagcgatcagctccgtcgtgtgcgccgtgtgcacgatccaggcgtttgtgtccgtcttcagtccataggctaagtaatacaattagatagaaatgaatgctcaataaaactcaaacaactgcatcaattatcagcagcggcgatatcctccgtcacgaccttcagcagctccttggcgttcgggtcgtgcggggctgcgagttctagccacttgcgtgccgtctccaggtccttgggcactttgccgtaacctgtacgatacatctgcgcgaggttcaccatcgccatcacaaaacccttctcggcagccttgcggaatagagcctcggcctgcagtgggtccttcggcacgccgtcgccggtgaggaagaggtagcccaggttgaactgcgcagtgacgattcctgtggtggcggcatccttgtagtactggactgcgcgagcctgattcttctgcacgcctcccttgccaagcgagtagtactcgcccaaacgagatttagcagtcgggtcgcctgcgtccgctgccttaatcagccacgtcaaggcctccagctcgttctgcacagggcatgtgagtcacgagacttccagacggtgttgcacaggctaattgatatagcttaccttgtctgtccccgttccagacatgtacatgttggagacgttcatgtatgctggagggatgccactctccgcgcacttcttaaacagctcgaacgccttcttctcgttcttgcgcgtgccatccccgttgctgagggcgtccgcatacgcaaacgcaccccatccgtggccagcagcagccaactaaaagcacatgaacatcaactaagctcacccatcgccacatccacgcttgaaaggagtttatcattcgcccacctccttgaagtacttggtagcgctagccgcatccttcttgggaaagcctgcagtcacaatacgtgcatcgcgtcagctgttacagtgcagttcagttcgacgtcgtcgtcgcacagcacgcaccgatgcccttcttcatgcacaaggcgtagctgaacttggccttctcgcttccctacagcacacggataacagcgaagcataagaacccattacacgactgaaaagatccgctgctcagctgcataccttctccattgcgatcttccacacgtgcagcgccttcttcacctcctcgccgttgtcgccagcgttgttgtagatcatgtttcccagcccgtggaactgtatgggcgagctaagcttgcccaccagcggcgactccttgaactgcgcagcaaagacttttcagcactggtagtgtatactcacattgaggacactggcccattgacgcacctgctccagcgtggcgcgttggccgagcttgcgcagctgccccagcacttcctgcagctcctgggggacagcagatacatcacgtcaataaatctgcaatccacattaaatacgtgcgaacaagacgcacctcatggccctccttggagcttgctacgcgcgacttgcgccacgcgccgagcacccgctgcatgcctctcgagcggcaggtgagtcctgtgcggttagaagcgcaactttcccccgtcactctctcgagtgtatcgttttaccccgcaatagtagctaccgtaatagtaagtgtaccttctataatagaaagacctaaaggaacaaatgtcacacatacctctatcatctgatcgaggttttacttattcagtttgaagtgcccgaggtttttcacttctgtaaaaccgcgggaagtgccacacacaagcaaggattcggagcgacaacacctgaagaagcgagcaccacgccatcagcgcgtttacaaaggcaaccgaccatcactccgtctttgattgaagcagccatgagcgacgacgcgacgcgcgccgaggtggcggccaagctgcgcgccgcgcagcagcaacagcagcagcagaagagcggcggccgcaagctgctgcgctgggacgcggcgcgctggcagcagttcgagcgcacgccgcagtacacgacgcgcgtcaagagcgcgcccattctgcccatccgcgcgccgctctcctccatgtacgtggcgatgtctctccagctagctagctgccttgcactgctgtggcggccgcagcagctcactagagctcgactgacgccctgttgttatggctctgacagctatgagatccacttctcggccaggaagaactacgcgccctccgcgctcatggagaagctcatctcggacacgcgctcgggctccgtggtgaacgtggggctcgtgatcgacgcgacgggcagcgacacgttcctccacgacgtcaagtacgtggcgtttagctgcggctgtgctttaaggccgtgtatctgactctatgacgtgtgtcgcttttggcattagggagtgggacgactgggacgtgcagtatgtcaagctgcgcgttgacacgcctgaaggtccgcgggatagctgtattttggtgtctgtagaggggagtacgtggctgacagggcggtttatttgacgtgttgcagatgcggaggagaaggaccgcgatgcccacgacgataagatggtggaggccttctgcaaggcggtagtgagccacttgcagggcgagaggaaggacatggacgtcgctgtatacggcgcagacggatacaacttcgtcggcttcctcgttgtgaggtgcgtttgcatatcattatgattggcagccgcaaggcatgctttactgatgatgctggatggaattgcagtttcttggtcgagcactgcggattgaacctggacgctgcggtggaagagtttgccgcctcgacacagcccggcatctactcgcgacactacctggaggtacgagtggttgtttgtattgcgatggagtcaacagcgagtgggttctgatttaactgtaaactggttctgggtgtggcagcgattgtactgcaagtatttcagcacgctgccgtcggaatcagcacaactggctgtgccggctcctccacgctgggaaaacgacgaaacacgcaagcgcaagagcgagtcgtctgttggctacgaggtcgtaaccgaacaggacagagtgaacaaattcgtgcggaagcagaagatcgtagtgcctggcgctgcgccctctaagccgtcaccagttagcaatggaaaggcttctacaccgggtggtttccccacgccgcctgtgtacaaagcgccaatgtacattccgccggatcgacaggaacagcgcccggcgaagcgtcgtaaaattcggtcgtggatggacgaagtggagcctctagcttttggagagacgctggcaacttcgtccgaggagcaccagaaactgaccaagtcattggagaagcttactggcattgaagggtttccaggctgcgaggtactcctgcttcttcttttcagttgcaacgttttgtacgctcacctgtgtgatacttcgtttgaattagaccattccattcacggcgacacacgttgcggaaggcgcatacaagcgcaagggttgcttgaccaaggcgtatcttgtgacgtggagggcgcgtgggtacgattttgagttcgcaagcttttgttgttggattttcatagatccactaactcttttgattgcgcgtgtagtcgtcgctgcttgctttacgtgactgcggacggaacgtacgtcgtctctcgggacatgaccttcacgaaggtggacatgaagttcccgaggcgaagggcaccggtacgtgcattcccacgctcatctaccgtgcaatacgaagctgattaaactctgtgtgtggctacaacagaacgagttccaggcgaacacgctgatcgatgggcttattgtggaggaccaagatcacgacacgaaagtggcacgatacctgacgtttgacatccttttcctggagggcacgcctatctggcaaaagaagttggaaaagcgactgcaatgtttgcaaaacgagatcatcgtgccacgcaagaatgtacgtgtttgtgcgctttcgaacggggtgtcccagagttttgcggatggctgacggcttttttccgttatgttaacaggacaagtcgttcgactacaacaaggaacctttccgcgtacgcatgaaagaccactttcgtctggccaagactgagtacatgttgaccaagttcgccaagagcgtgacgcacgaggtggacggtgtcatctacaccccaacggaggctccgtacaatctcggcggcttcgagagtgaagagcccattttcaagttcgttgctagcgaaggcggaggcatccctggtctggatggaagcatttccgagcggcggcttctccagtacgtcaactccatgccgaaatgagcgaattaaagcgatgcaggtcagcaccatccttcattgatgccaatagtgaagagcagaagatgctctgcaatcgaggaaggcagcacccctacgagagagtgagtgagtcattggtcagtccatgtcatgcatgtaagtagttgtggggttgccggtgctttttggatacagagggagaagagaaccgaatgaaagcgagaacaagtgacaattgggcaaaacgacttgtgtggatgctgcgcatcatgttgctatgtattcgtcgttgctggaaggggttcctacttacggttgacgttcgctcgatagtgttttcggccgtagcgcggtttcttctttgaagcatcaactctcgatgacgcttttggtgacgatgacgcagaggacgacctgtgcgaacgggtcgagccatgcgaggagcctatgctttccacctcatcatctgcgaacgaaccagcatcctgtgagtgagatctggttcgatgtgagcgtgcggatgccgaagacgctgaactcagttcccgagtactatcctgcatctcataggacgctgaacgcagttctcgagtactatcttgcacctcaagggacgacgacctggcagttcttcgctcgtggcgaggtcggtcttcaaagtcgtccgagtggcgatggcgatctctgctgcgactccgtggacgctcttcgtcgtctttatgccccgatctcctcgaacgacgactatatctgctcgagtccaccgatgcggacttgaccctgtgaacgtggtactgtatctcttcctcctcctcatcctgctggatgtaacgaggtgttcgttggcgactggagcgttcgtccatatcgctggtcgatgctcgtgtagtccgtggtgatcgtatcagcaccgtcctcttcagactcccatcagcctcgtcgttatcgtcaggaccgtgcttggcggacacgagcggcacggaatcctgctcgaaccacgcgtccttcttggctttggcgcccttggagtccgagcccccacgaccccagttgcagcacgcgcagacattgcccatcgctgtagtaagccccgcgccctcgttggatcagttgctcactgtgtagactctggtgtgttcaaccggcggatacgcgaccattcgggttacggcgcttgggccgaggcttggcgggatgaaaagactgttccacgttacgattgatttagaagcgcttctcttctcctggagcgcacagcacaatgcactcgacgtcgcgcagctccttgtagttgacgacaagctggaggttgtttggatcaagcaggcgagcagtttggaggtcgtgagcggcggcgttaaagtcacccaaggccttgtgagcgaagccccgacggaagtatgcgtgcgcgttggtgggttgctgggcgatgacaaacgagaagtctgcgagggcttcggcatggtatcgctccagctgtaaggctttggcacgttcgtggatgtacaggagctgggcctcgtggagctgttgaagctggttctgcttgtcgcctgcgtcgtggagttcatcttcctgattgtttcctgcctcaatgctcttggcaaccagcagtgagtgatcgtaggcactggtgaattgctccacagcgtccatgttctgaccctcgagcgcatacgaaagccccatgtgataatacctgttcaaagcaaaatgagatgctgaaaaatggtgaaaggattctaccggaagtcagagaaacgtacagatctggaagcagctcctgctttggtgtgcactgcagtgcgcgcttcatgaacgcgacgcattcacttggctggtgctcgtggtagtagcagagtccgatgtagtacagcaacctgcaaccagcagacacgaggaatgagttcaagaacaagccgttgacagcagagtagagcgcactttgtgtctgtgctattgcgagtcgcagtctcgtgcaaatctggcagggcctcggagtagcgcgcgcactccatcagacacaacgcgcgatggaatcggaaaatgtcgtttgacggcgcttgagccacgcaaacctggatacaagagtggtcagtgtcagcagacaacttggtgaaggctcagcaggactacgtacgttgagatcacgaagagcgcggtcataatccccaagtccgcgcagtgccataccacgagcattgtgagctgccatgtcagcagtgtagccgcccgctatggcagcactacagtcgtctacggcgtcctggaagcgaccaagtctcagcgcgctctccccacgcagataccgtaagccaaaaatctggttcgtgttcgcgttgctctcttcgaacccttcgagtagctccagtgcgtacgagaaatctgccagagctaaaggatgcgctcgcatttcttggagtattagaccccgcgcttcaaggaaaatcggttcgtctggaacaacatcaagcgcggccgtgagtagttccagggcgcgttcatgatctccgagagcgtggcagcaaagcgctgtgtggaattgaaccagtacgctcttgcggttttcaggagcacttgctgctattgattcgaacattgatcgagcttcggagtgtcgttgtttcagctgggtaatcatggccattcctatctgataaggagtgccgctcggacgcagcgtgcaggccatttcaatgtcggcaaatgctgcctccagttgctccgacgcagacatgtagctcacaatcgaagctgcgggaaccactgcggagccgacagcctcgccatcgttcagacctctggtaattgcacttggcgaactgattggcttactatcagtgctcgagttgcttgcgttgctagtggctggagctgaaggtgcttgatcaagatccaacgatagtgcgagtctcacagagccacggaagaagtaagcttgagggtctcgaccgtcgagctggatgcacttgttgaagtcagcaagacactgccgtgcgaacgcgcccatgccactggttatcgaagctgctacattctgctgctcgcgctgcttcgctgcagcggcttggccttgacgatagtaacacagccctcgatagctgaagtagctggcgtttcccgagttgagctcaatggcccgtgtgaacccgtccgccgatctttcaaagtcgccacactcgaagtgagcgagtgcaagagcgctaaacgccgaagcatttcgtgggtccagcttaatcgcggcttgcaagtcctcgatgcacttggacaagtgcccgagccgccgatagcagttcgctcgagtttgcagcgctcggtactcgactcgaattccaatccccccgccattcgcgggtggggtcgcagttgcccctgatcctcctgcattatttgctgcagcatttgcagcagaggccgtggatccgtcttcaagcgcctttgagaagtcaacaatggcctcacggtagaaaccagcgtcatgcaacacaagcgcgcggttaaagtaatggggtgccttgcgtccatcgagctcaatggcgttggtgagatcttccagagctttcgcagtctggttcagcttacgatagcaagctccgcggttggcgaagtagagtgcactgcggtcgtccagcgtgatagcagatccgtaatctttggcggctcgttccagttctccgatggcacgaaacgcattgccacgagcgaggaagaaacgagcctgtgttgggcggatggcaatggccagggtgaagctttcgatagcgcggcagtggtcttcaaaggttgtcgctccatgcgcaatttccattcctttctggtacagatccacagcatgctgcaggtcttgctggccttttgcttccggttcaacagaaccaaccccctgtggtcccgtgataccgctagttggatccataacgtgagatttagtcggtgacgtctgctgattgcttctcatcgcgtgtaatgttttgcctactatctcctgtgcgatcagtactttgtggtactctccaggcgtgaaagtgtgtggatgcgaagtgtgaaaagtcttcaacttctttggagacgaaaccccagctgagggcctggaaataggtcaacacgataccaaaatgtactgagtgaacgaacgactgcgctcgaagaccaagcaatttgtccgacaatggcaacaccattaccgctggaaggcgatggcttggtagaaaatctttttcattacctgtggacgactgacgatctcgggggtgggccacgagtgagcgtgccgcctacggtgatttatcgtggctcgcagcctgttgcttggtacttcacgagtcgcaagagcggtcgtatcaagcgcaaacaccgagcgaacctcacggctgcacacatcgagcactcctttacgaagcggaaggcgtcgacggacatcgtggcgtattacctctacctgccgagcgcagagagcacaagtcctgcaattgaatactacgacgctgaagcgcttcgagagtttttgttcaaaagacccgagatccctcactcgtccactggagcatttcaatcgggaggaatccttcaacagttcgctctgccaaaacggtctcggaattcgactttgcgagcgatttggtcgcccaaactctgtctactggagcgtcgcgtgaatattcatgcagtccacgacgctcgcttcagtgtttatgaacgtggcgtcacgttcgaagagggcggtggcgccgaggcgctcactcgaccggaaccagtgcgaggctcgatgttacctggcatggttcagcagctctgcgaacgagtggtcgatcatgtcacgcgcgtgtcgtatcacaagttccgcatcgctagaatggtgctacgtcttcaagtagatgctgacgaccgactgtggttattgtggagttcttcactgcgcttacagccgccactagctccgactactacggtaggacctgaaatctcaactggcgagcctagtatacgaccactggacatcgtaagcgatgccaaagtcccgacctttgcctttgcgcaaggctccgggggcggaccagtttccttgagctcaacttgtggccccgaggtagacgaagagcctcgtccaggacaaacgcgttgtgctagctgcgcccaggtggtagctaaacgcgctctgctgcctacgacctataaagcggtgctagcacatttccagcacgtgctgaggtttcttcgggagaaggtgaacgaagagaaccaagttgcaatagaatggccacctgatgatcgagttgtgcaacaagctggaggtgtaggattcggtatcctgcggcacctaaagtcaataagttccagtgttgacgacagcggtgcaccgaaagctggctcgggtttaaagacgtggcaacggcgagagctgctcatacctcccgtgatccgctacttacaccccgtgcttcgccccgaggatttcgctcgccaccgacaagacccgatatttctccacaaaaccgtgggggtctgcgaacggtgttgtcttgtatacgccgactatgccaccgcatcacttgaagccaacgcactcgggataaggagtagtgctagcgctccagcactcttgcgtccagttcgtgagaagcccaaacacgcggagtttttcgacgatgaggcaccggattcactcttgctaaccacagcaaactcaagaagcccattgggtcgaggagtgcgcacggtgacaagcaaaacaaagcctccagcctccgcgtggaaacctgttccaactgatgagcgagggcaacaaccactgaagtataagaccgggcctcgcagcactctgcattccctaccgatggcgccgaaacttccaccacgaattgaaacatttgaacctggagacaacgacgctctccgcatcccagacgccatcattcacgacgatgggagtcctcagcagcagcagcaacaaagggaggaagcatttttccgtgaactttatcaacaaaaagacaccgtcaaacgtggtggtcatgcacttcgccacatcctagaagctgctgatcgtctctcgaaggcaaaaccacagcatcgtctagctgcattgggtaccagcacccaaatcggacaaagtcaatcaactggagcactggctggcgcgatttcagagctcaaactcagcaagaagcctggaaagagtccttacagtgtggttcagcgaatacgcgatggcgatggtttacctaaaacccagaaaattggaatctcctccccagctaaatctccgctcacccacgactcgaaaccagtacaaaagaagaagacgtcgaagaaaaagcgtagccaagatgaaactggaggagagaaagcgcggtttatcagctcacgggagaagagagctgctgcagctcatcgaggctacttggttgctgcactatcagacgctcaagtacaggtgagtagtaacttggggtggcctggaattgaatttgttcaggtactaatgtggttgtcatgtgaatatttcagttggagcacatcgagtcgctggcgtcgttggtcattccggcaccggatatggaagcagaagagattaagcctgatcaagacgagcaacaacccggtaagaagaaaagtggcaaggagaagcgacctccgagtccccaggaggaagaaactgcatcggccgaagaggagtctgaaacagacgtcgccaatgtggaatgtgaagcgcagagtgagcaacagctcgagcaagaagaagagtaccatgaagaggatgttcaagaacaagacgagcttgaagaacaggaactggagtatgaagaggagcaccaagaagataatttacaacagcaagaagaacctcaacagcatgaggtggagcgacaagaagagtatcaggagcgagggaaggagctggaacaagaacagcacaatgacggttttgaagatgcggatgttcatcttgatgctcaggaacaagaagagcacaatgacaggcttgaagatcaggagtgtgcagaatcttaccttgacgtaaaggaacaccaagtcgaagcagagtccattcacgagggcgaagcacagacacaagagcagaatatgcttgaagacgaagaggagcaaggcgaacaggagaagcttggaaatgtggaccaaggcagcctacaagcggacactgatttgacgcaggaagcagaacatgaactggaggagtacgagcaagaaacacaggatagctcacagctcatgcgccatgatccgtacgaagcgcacagcgacggcacggctaaccagctcgttgacgagaatcaaggtcagagtcaagagtctttactcgagcaagaaggacatcaagaacttgagcataggtcagataaaggatcggagcaggagaatctacccatactgaacccaacaggtgaagtggactcggagattcaccacgatcaagtgatacaacaagaaccggttcaggtacaagaagacgaagaccaggacgaatacgaagatgaatacgaagaccaagacgtcgagaacgaggaagatcatcgggataaagaagaccaggacgaaaaactaccagtcgaccaggttgagtatggcgatggcatcacaactccggcacaaaacctactggagcaagctcgagagcttcttgacacttctgatagtgctgaagatgatcacggagcggtgcttgagcacgacggatcgagtgacgcaagcgatgacaacgagcacacctctgtcttgtccccgttgactcctgctttcgtagcccacgacgaagattccagcgacgacgccgtcattgcagcggactccgccgtcgcggctgctcttccattgccttcatcggatgaatccagcatcgaagcagcaactgatgaatgacagtcgtgtgtaagataatataaagcatgcattgctttgggtctgcaccattcctactttttgtcttgactagttcacgctgtgcattttgctgaatcgtgcacgagcttccacgtattccgagtacgcatcgcgcttccggtggtagcttgtgtttttgttgctgttcatgtgatccatttcgccgtcgtacacgaacgcacgttgctgagtcgtggcgagagggtcggatcctccggggacacctcgcaaaactccgtccatgtgactgcgcttagcgatcggcacgcgagatggtggcgtcgctgttgcagccctggatacaagctcagctgatgcacttgaactgttgtttcctctgctgccgtcttcgttcaacagcaagttcggacgcagaggttgcaccgggtttctggcggcggcagcaacgatcgaaaaatcctttttggcttgctggggctccgtcagcacaaacttccttggcagcgtcttcgcatagtcgctctcgcgcttggctgccagctccgtgtctttctgggttgtccgcctgcattcatacactttagagatcatagtttgccatggtgtttttcatcgatcaagacgaagaaagcgtaccatgtgggcttctggccgaaagttattgggttgctcacgttgatggtgtcggccagcgatgccaactcgcgatccagtgcgtctccatccatagctatgcgtatgtcgctggaatactcgtgcctgcgctagaagcacctgatcgttgtcttcaatatgccgagacttctttgggctattttcaaaccgagcactgcactgcacttgaaagcttggctgccctgcaacatgaacgcctagttcataaatataggggctcaatcccgcgcgtgaaacagataccaacccgcgtttgaacctgctagctgcactacggacaaatacgagaccaagtgcacacacaaagcacatgcacacgtacgtggattcgcatcatagcgcattacctgccacgccagctcgccacgagcccaacaactggccgtctacttttctcgtgcgatgtcgctccacctctggcaccgcacaattgttcctgcctgcctcctagtggttgatacattcgagcttagaccagaggctccaggtccatctccaaaacggacgtggggttcagcaggtcgaagttcttgagcacctgcgggtgcagcacaccgaacgtgccgagacgcaggggctccgcgtcctccttctggagcgtcaggtacgcgcaacggccggggaagtatgtacgctcctccgcgggcgtgatcgtgtagtactccttcgtgccggcgggcatctccagcgcggacggaatgcccatcagctgcatgatgcggtcgacgaggccgtggataacctcgaaaccatcggtgggaccggtgtaggcggcacagatgcgacgcacgttcttggcgccaacgtccgtgttgtcgtcgatcaccacgacgtccgagatttcgaacagcttcaggccctccttgatcgacatagccttgttgttctggatggtcttcagcacaccaggcagcatcgacgtacgcacaacctcgaactcgacagtagccgggttggccagcacaacagcggagtggccgtcgtcctcgcggttcaggtactcgaagttctccttgtgcgagcacaggccgtgggtgaggagctcgatgtaaccagcgcggctaatctcatcgcgaagaaggtcgcccagcttgttcagaggctgcgccataccgatggtctgcgtgtgcgggatcgtgagcgggatgttgttgaagccgtaggcgatacccacgtcctcaatcacgtccacggggtgcagaatgtccgagcgcgtgatcggcacctccgcgataatggtctttccgttgcccgagggcttggcgtccagctgcatcttgttgcagagcttgcagatccggtcgacgtccaggtcaatgggctcgcccttgccgaacagcatagagtagatgttcttgatctgcacctccaccgagcgcttgctgaggttgggcgtcagctcgttctggttcaccgtctcgtcctcgtagatgacctgcacaggctcgaccgtgaagggcttggcgcagtactcggagaacatggcgatcatggtgttcagcacgaccttggccttggtgatgtccgtggccgtgcactcgatgaagacgttcttcgtgtccagcgagatcttcgagtgctcgccgttgatgatgggcggcagcgacagcaccacgccgttcttgtccgtgatcacggggtacacgggcgagtcgtagatgatgtccgtgtacggcttgatgtgcttcacgtccgggttggtgcggtagaagtccagcagctccttggcctcaaactccttgtcctggctcagcggcttgaacttgatctcattcggcggcagcgcctaaaaatcccaacaagccaaaaagccaataagtatcctagtgtcctcaacccccaccagctattgcagcgcgccgcgtacattgtaggtgaaggggccctggatcgtgtcgaggtcgtgcgtgccgatggccacgagcgtgcggcgacggcagatgttctggtgcagcttgtcctgcaggtcgatgaagctgtcgtagcgctcctgcgtgaactgcacgtcgcgcagcacggccgacaccacgaacgggcgcaccaactacaacagtaacaacaagtaataaccctgtcagactctatctattgcaattgcaatgcaattcaattgcattggcacggaccttggtgttgggcttgaccgtgatgtggtgcgggccctcggcgcgcggcgtgagcgtgtacacgggcgggcgctccttctccaggaagatgcgcagcgcgcgcgcgatgccctcgacgcagagcaggtcgtagcggttggcgggcacgtcgatcttgtagagcacggcgtccgagtgggccgagtggtccttgtcctggccctgcgtctcgcgctgcttgagctgcttctcgctcgtgatgtcgtccagctcgatgccgaactcgaagcacagcacgtcgaactcctcgtccgtgtacgtctggcccatggccgcgaacagctcgtcgcgcttgacccccacggtcggcatctttggctctcctctgtgtgggctcctggtgttagctgctgggacttccccgaatgagcgtcaccagtggatgaaatgcagcgccgagcgctgattcgctgaaaaccagacgacatgtcgcatacaatgtgattaacgtatcccgtcagaacaatgcatattgccatcatttaacatactgtaccacatcgcgacggttccgacatccctacattttccgacaaataggactcttacttaaagtattgaccaaatttaggttctctccaaaatgcaactgcggtgaagatggtaaagtaagtgacggtgtcgaatggaagcacatgcggctaataccacatgtagtagaagatatcaaagagtacaaggatagctacatatattactgcagttcaccttctaagatgctatctcggcaatcttgccggttgttgcagcacgcgtagtctaacgctactcctgttcgtctcattcgacttcaccagcctcgaacgggcccaccagcgaggtcatgacgggccgttgcccttcgcggggcacgttcacgaccgcggtggccttggcctccatctcgtccggggcagcgacgcgcatggaggacccagcaggggtccgcccatttcacctgcgctggtggacttctcgctggatgagcctgacagaccgacgccccgcttttgagcttgccgacgtggagccctgcgaccacgtgcacccgtccaccttcttgtccttgggcttggtcggctcgccgccgaccttattcacggtcacgagggtcatcttgctgacgatcttggggggcatagtgcacgacgtgctgccgcacgaacagtagagctggccgacgtctcggaagtagcagccctcgacggagacggagcccgggacgttgtgcgccggccggcgacctcgtcgtagaccgccaccagcgccgttcacctgctgaccttgttgcccttggtgcacggctcatcctcgcttccctcaccggacagccttctccagctcctgctcgctcttgatcatctcgcccgacacaccactctcgccgatgcaattgccctcgcgcaccaccacctcatcgctgcccatcgtgagcacgcacaccgtcttcgcgtcgatgggcagcgccctgcagtagcacacgctcgacgtgctccatccagccccgaccggtgcgccgcgcgagacgtcatgccccgggtccgtcggatgcgtgcgcggaggtggcggcactgtgcaggaaccgcgctccgcgctcgccgtcgtggtcacgatctctggccgccgctgggtcgcgtgtgggggcctcctttcttgaacatggtcgcgattcttgcaatgaacaccaatcaaaactccaatccgtcctattctaggacacatcctagctgtcagaacggcgaaaatatttgcaaaatattttctatacttgacttttgtataggcatatacatatttaggccagccttcagacaaatatttgtcggaaagtgtcggaatgcattcacctaaccctaaccgatgtcattggctaaaatagcgactccaggcgatatgataggctgtaattcagatgatgaccagcctgaaacaatcctgctcacttatcagtcggaaagaaagaccacttaaccgctgaagcgacgcaaaggcctcaacttcaactattcgagctcatggagctgctagacggcgggccccaggccgagcgctcgcgccgcctggaggcgcaggggagaccgcgacccgcgcctaagcccaagcctcttcccagtgtggtgcccgtgcccgcgcctgcgccgtccgcgtgcgtctctggctgctgcgtggagagcgcgcgactcgcggacgagcgggacttcctcagaggttacgcggagcggctgctggtgcagttgcggggtttattgcagcgctatggggagctggagaggctcaagacgctggcggacgcggcgcagagtgaagaggagccgcacgagcgcctggcgccctggctcacggcctccgagtacacgaacccgctgctgcaggcgtacgacctcaagatccaggagctggtgggggcctgcaatagtgtagagtagatagggtgttataccggttaagaggctgatatagttattgtgtgtgaattgctgataggagacggcgatggtggataacaagaaggcgatcgatcgagtggcggcgcgggctgagagcctggcgaaggagaacacgacgttgagacagtgagaggctgtgtggaggagacttttatggtgggaatattgtggctgagtggggtttgatattgttattgatgcagagagctggaggtggcgggggagaagttggtgctgcgcatgcagaacgagccgaaggagatgcacgttatggccgacgacttgatgagcatacaggagaacggcgagtacctgcaggagatcaacgagcggatcgacgtgctgatggccgagaataatatgctgatggagcaagtttcgctgcaggatgatgaaattggcgccatgaagaaggagctgacggacagagaccagcagctgcaggtcatggggcagaacttcaacgacgcaacgcttgcgctgcaggagctgcgtgacgcttgctctcaagtgagggaggagaaggcacactgtgagcggcagttgcagcggtatgcggcgtcaatggcgcagctggagagcgccaaggagtctctggtggagcagacggatgcagttcgaaaagaacgaggtgatctggagaaccagctcggggagtacgaggagatgctggagaaaatgaagaggagcaccgagcgcaaggacgaggccttttcagcacgttatcagagcgtctgtgtgcgtctgcgtgagcttacgaatgctctggagaagaaggacaaggcggtggacgagctacaggaacgcaatagcggacttcaagctgaacttgaggctgttcgtcaagattgcgaaggcatgttaaatgttcttaacagcatggagaagcaattgacgcagtattgcgcgagggaggacgcagtcgctgaggtgcgcatgaaataattccgacttcgtcttacggcgctcacccagttcttttcatgttgttttagttggaatccgagtgcaaagcgaaggtcgaagaggcgatccttgagaaagaagaggtttgtgaagcgtgactcaccgacagctctcgaaatggtcgaatgattgaccttgaacggataatttgtatttttggctttgtaggtcgcagctcgtgagctccaaagccggcgtgagattgcacggttgctggagcgacttcgacagcaagcagcggagcacgccaaggctcaggaagaaaatatgggtaccatagtgcgtaagcacgaggctgacatgaacaaccgggagcaggaaatcaggtcgttgaatagtgaactcgtggatttgcggtccaaaatggagacaacagcaagaaaccagaaggaggctgacaagaagcttgcggatgcaattcgtcggtctaaggacgcaagcattgcgtttgaggtaagtgcgctgcatgaaagatgatatcacgcaaagctctttaaacatatcacggctgttgttcttgcattagaaaaaactgcagcatttgactgagcgagccacgacagcagaagaggcccgtgatatggtaagaaataccgtgtccaaaacaatagtgtgcccatggagttgtgtattaatgatccacgcgcgctgtcactagtcaagccacttagaagctgagtacctcgaaaggattcggtcaaaggaggatgcgcttataaaattacgagcggagttccgagatcgggggcaagaactgaacgtgagtgcattgccatattctgggttcgaatctggcgatactgaacgtgtttgatgtggtcttcctcacaggaacgagtaagttcgctagagcgtgaattagaaatgcgtcgtacagaggcccgtgaggcaaaggatgagagtgaagagcagcatcgcaaggttcaactcctgaatgagcaactgaataaggtcaaggcggactgtgcgaatcgcttcacaaacgaattcgaggtgctgcaccagcaaaaccgcgacttgaaagcccaagctgctgagctggaatacaaactgtcccaggcaaagaaggaggcagcttcggctttggacagttcgcgtaacgagcgagaacggagtgaagtccgtctgatcgcggaagtcgagagcctgaaaggaaggatacaatcgctcaaggaggagcggaaacgagctgataaaagccgacaggagacagacgcgaggtgctcggtgctgttgttacaagttcagcaactaagccgagacctgagcgatgccaaggagctgctgctcgaacaggagcatgcctgcgatgatagcgaccgaaaagtgtcggagctgagtgcacaactcacggcagcgctgtcgaagcagcaacagttctatagacaagaacgcgagctacgcaccgcactagagaggatgacgctcgagcgatcgcggatggagcgggaggctacggtacgttgaagattttgcagtctgcatagatattatagcaaacctcgttgacatcgtctttggctgagcagatggcacgcaagaaggttgaggagtaccgaagcagcagctacgcttacctcccatcttcccgctcgaggatgcacgcggacctaaaggatacttcctgtggtgtcccgcgtgaagttatggaggataagtttgacccagccgagaaaagtagtgttcgataccaaatgccagctagctcagattgaggccactacttttgaaacattgttttccaatcgaagcatgaccgattcgaggtgtgcgagcacctacttggcaaacaagagacttgcgttggttcctccgaatccgaacgagttcgtaagtactgagcgcagctccttctcctgcggttggtttggcacgtagttgagtgtgaactcctctgtcatctcattgaggttgagcgtaggaggcatcacgttctacagtagaaagcacgatacgaaggataaatgtcagttttagttacttggtcacgacagctttcactggaaacgtacatggtgcagagccttaatcgagaagatagcctccacagctccagcagcgccaagcaagtggccaacagcgccctgacaagaacggtggaaatgttagcaaaaagataaccaacatcaaatcatatcagtggcaacgtaccttcgtcgacgacattccaagttgtgtagcatgttcgccaaaaagctcttttaccgctgcgttctcggcgcgatcgcccagcggggttgaggtcgcatgagcattgatgtatccaatttccgacagcgcaaggcccgactgtgcgacagccgactccatcgcacgtcgagcaccgtcgccagtttcgagaggagcggtaatgtggttgctatcgccgctgagtccatagcctcgcacctccgcgtagattctagccccgcgcttcttagcatgttcgtactcctgcacagacaagcacaacttttagtgaaaaaaaatgtagcagtcatcaaacaagtgcaatcttcgcacctccagcacaacgacaccagcaccttcgcccattacgaatccatcacgctgcgagtcaaatggtcgcgatgcctcttgcgggcgatcattaaactgtggcgccacacatgacatataacattagctttcatcacgctgggagaaagcttttacgaaggcattttaccttcgtggaaagtgcctgtgcgcgcaagaaggcgcagaccgaaatctcgttaagagaggcttcagtgccaccagcgaccatgacatcggcgtttccgtggcgaattaaattcgcggcgtctccgatgctgtgacttcctgtggcgcacgccgtcacgcaagaatggttcgggccctacgcagcaagtacacaccacgctcacgtgagataactgcaataattccgtctttagtaaacaactttgaatcgcaccttgagaccgtgctcaatgctcacgtggcccgctgcaaggttgataagaatccgcgtcacgaaaaatggcgacacccgacgatatttctatgacaataaacacatcaataaatatgttagctaacgcctacatatattccgaacacagcgacccacgactgtaccttatccttgatgagctggcccacatccatgacttcttggatatttcccattccagaaccaatagccacgccctactcaatcgatcaaaagcacaaccgaagcgtcactcaatcatgaactgccctactaccagcctaccccacaacacccaatcaacacaccgctcgttctcgctcctcgtccgattcaggactccagcccgaatccttgatagcttcgccagctgttccaacaccacagtttaagctctaaatccaatagcatccaagcctctaaattgtagctctaacctgccgccagcgtgtaggcgatgaagtctggctcctgcgagcggaagttcttcacattgacccagtctttcgtgcggaacgccccttcgccgtctcctcgcggcacggtggctccaatagtgcagttcagtcccgtgtctgccagagcgtccaccgtctacaatgcacagcaagcagagcgccaaactcatcaatgttaatcctctaaactctacacagtccaaaactgacgctgtgtcatacgcggatggcgcactgcgagtccagcagcgcgtcccacgagcgcgagacgcccacgccgaagggcgtgacggcgcccaggccagtcactaccacgcggcggttgggcgttggcggcggcgcgctgaacgagagcgtcgacaagcctcgcgctgcagaggaagacgccgctcggcgcagcatcttgattgggtgtgcaactgtgaggcgataagtcgcttgtgtggagcacataaagttgaagggcgcaaagcttagctttgggggactccagagctgacttctgggtttctcaaagtgtttgcgaacagccaagcacagacgccattacgactcgaccagaagatggatcactacgaaagaaattgtggcgaccctctcatcgtggaggtacccaatgtctggttccgatcagtgaatgcgggttctcgcagtccattcacattcaagtgcgcggcagtagactccgccgcactggttggaactgtccaggatctgttggatgctgtgatggagaggtatagcggcagccttctcgctggagttgctgcgtgcaacctccttgtgtttgcagacgcaaatgcaagaatcgctttgggcgtggaggaccatttgaatcggtatggagcgaagagctctgacccgcttatcgtggaagtgccggagatctggttcgagctgatagatgcggatactggcagggcattcttgggcacttgtgcagattcggccctcttggctaaaagtaacacagtccagaatttgaagaatgcagtgaaaaagagaaatagcgacacccttctcgccggggttgctgcacccagcctcatcgtgtacgcgaacacggacggtgtgaagcggagactgaaggaggatgcagttcttggatcgcttggccaaacgatgcagacggcgctcgtcattgaagtgagacgcattttgcctagtcaattgcagtggattgtgtgagccttgcaagtgccatttcttgctcgtggggtaatacttctcgatcgtattcgtaagaaaatggtgcccaaccacttcattcttctagtgatatcatttttattgttggtttgggtagcaatgtccctcgcgacgtaaggagaatcaacggcataggatattttacgaaagctatttgaggtgatttttggtaatttactaaattcctcgtttacgtggtgatttactagaactttgtatgatggtgatggaccaatcagcgagagtatcaccaatggcttcaagtctcagtaatcgtgcttcaggatcagtaccccccatgcgtatcatttgcgttcaacacttgaccgccacgaggtccgcgagtcccgtgggggcgggctccctcacaacggattcctccacgtacattgctttccaatcgcttccttaccatgatgctcgctgtgcgacgtgaagctgcattggtccgcagcctttcgacgctctcgttcgcgccgccgccgccggtgcctcctcgtcgcgtggtggtcaccggactgggcgctgtgaccccgttcggcgtaggcgttgagcgcgcgtggaagaaggtcttgggctcgcaatgcgccattcaggtacgatggcgatggatctttgtcgtggttgcattggcattgacaaaatcgttgtggggttccagtcgctggacatgttgctggactcggggctcaactgcacagtaggggcgacagtgcccaggggtgatgaagagggcgcgttccacactgcagactggacgaacccgaagagcttccgggcgcaggaggtggatcacgtcgccatggcgctagctgctggtgcgtccgtctccaagtgatgttaacagtctagttgagttgaggctgactcgttgtgctgtttgaatggtgagagcagcggacgaggcgatcaaggactcaggctgggctcctgagtctgatgaagagcgcgaacgagcggtacgacgctggtaactgtgtggagatactacggtggtggtgctgacggtttggttgctggtagggagtggctatcggtgctgcttgtggcaacattcaagaggtcatggacgtcggccagctcatcaaggagagggtatgcttgcagtgtttgtcctggttgctggcaccaaatgtactaacccgtgcacttacttgcagaaattccgccgtgtcacgccgtttttcgtgccgcgcattctgatcaaccttgcagccggccatgtcagcattgagcacggactaagggtaatgactacctcctgctacttcgaatgaagcgccgtcttaacccctttctgatgttcttgccaactcgccaccaacgtagggaccagtccattcgtgcgtgactgcgtgcgctactggtagtcacagcattggagacgccgcgcgctttattcagcacggagatgcagacgtgatggtcgctgggggaacggagccgagcatcaacgaaatggctatttgcgcatttgatcgcccacgagctctgtcgacgaaggtttgtgcctttcggagctctacctcatacaattcaacagctaatgcatcatttcttctcctcaacagtacaacgaccgcccgaaagaagcttcgcggccatttgactcgaaacgcgacggatttgtcatgggtgaaggcgctggtgtcgttgttctcgaggtgcgtccctgaactctaccgctgctgcattcactataaaaatacttacattagtgctacgtaggaatatgagcacgcaaaaaagcgtggggctcgaatttacgccgaggtgcgcggctacggtctcagcggcgacggcagccacatcacagctccactagaagacggcgacggtgctcgacgagccatgcgatcagctctagcacagtcgggtcttgcgctgtctgacatcggatacatcaacgctcatgctgcgggcactcctctgggcgatcgcgccgaaaacaaggccatcaaaaccctcttcggagatgatgctaaccagctcggcgtgtcttccaccaaggtatggagctagactttgatgcgcatggaaaagtatctaaccttccatccatccgtcttgaacagggatccatcggccacttgcaaggatcggctggtgctgtggaggcaattttcgcgatcaaggcgcttcatcacgtgagtctacagcttccataactacttatcatcattgttgccatactaacaccaaaacgctgtcccaacagaacgtgatgccgcctacactcaacctgaccgagacgacggaggagttcacgctcaactacgtcccgaagcagccgcaagagaaggaactccacgctgtcatgtcaaactcgttcggcttcggaggaaccaacgccagcctcttgttcgccaagtaagcaaccagcaccccgccccaaccgcagacgcccccgacaacttcaacttcgcgctgccagacggacatcgggtcagttttgacacagaaaataatgtcaataatgtctatccatacagcgcatgtattcacaaagaacatcgctcccgtcaggttccagtgctctgacaccaagagatcccttgtattccctgtacctttcgagtgccatctcgcaaaaattgtcgactttcgcgtcatcaggaactttcaagtagtccgagagttgggacgagtcgccccttccaccaactggaaatacgttctcttcaccatatcaccaacgccgccgattctacaatgcgcagattcagtcactccaagtcttagatccaattctgctgatgatacatttcgacacgaaaactgaaaggttgaagtcactgtcatgtcaatacgctcgctgattagcccagtccccagcatacaaaattcaaatctaatactaaacgaggcatttccctcaaacaacttccgtacgaagatcccaatcaaaagaaggtgcgatggatactagtcgcggcgcgcgctgggcggcggcgctggggctgcgcggggacgttctggcggcgcagcgcgagcgctacgagcggctgaagcagcacctggtgttccagatcgacgcggcgggcatcacggacccgctgagcgcgatcgcggccgccaccgacgcagcttcaagcagccacgaccatggccacgaccacagctggagccagtacttcacggacgagggcctgctggaggagatcaacacggacctggaccgcctcttcccggcgggcaacgagggcttcttccagaacgagatctacctcagcacgctgcgccacgtgctgttcgtctggtgcaggctgcacccggacgtggcctaccgccaagggatgcacgacgtggtcgctgtggtgctctacgccttcttgcaggatcaagaggagcaggagacggaggtaattgaggagaagaaactccggcaacatgccgaggcggacactttcctggtgtttgaggctgtcatgctgttcctgaagccattttatgaaattgtcaagacgagacccgaggcgccgacgggttccgcggcgcgggatggcagtagactgtttgataacttcaccctgaaggagaacgacgctgggaatgccgcctatggactgcagacgagggacggaggcaagcagccagcgctgcatcgactgtgccaccatgtgcagtacgagctgctgcagcagaaggacccgcagctttactaccatttgcagaacctggagattgtgccggagacgtactgtttgcgctggattcgcttgttgtttgctcgagagtacgcgttgaaagagttactgtgtatttgggacgcgatgattctggatgcgagtcgggaggctatcgacttcccgaagatcaacatgacggacaagtccgataacgacttgctgcagctgcccaagctggtcacgaagaatgaagacgcgtcgtggatcggcttcccattgctgcgttacatctgtgttgcgaggttgctgcagatgtcgtcgctattgcgccagtcggataatactggctgcttgcgcctgctcatgcgcgcgtaccaagaggaggaggctaatggttctggtttggagaggaaaacacaggcgctggagctgacgaagtttgccaagatcctgcaaaacccaatgatggaggaaacgcagcacaagaatactgtcggttcgaacgaggaaaatggagaaaaggatacgtttggggagatagaagttgttcagtttcaagaaggctcacttggtataattctgacggcggctggagctccttttgaagatcgactggcggtgaaatccttcacgaaagacccaacctcgagcgatggtgtgggccaggcagaagctagcgacaaagttcaccttggcgatttactgcagtcgattaatggtgtacctatcgtgggggtgactaccgaagaagtgaagcgccgactccagctaatcgaccgtccgatttacatggggttttgccattgtggtgaggcttatggcgacgccgatgttactacttccgaggactctgaagctgtcgacgcctcggatgcaacaggctcttcattggccacagatacggcgctgtccgagctagtgcaaccagtgtttttgcccggcgagctttgctacgctaacgtcgagactagcatgcagcgacttgtgctctctcacgacggatcgtgcctatctcactacattagcgggaagctgttcattacaaactaccggtgctttttcacgcgcctgctcggtcgcggagaaattgactggcagatcccggtcctttcgatagcctcaattgaccgtgttgaccctcgtgcgattccgttgggtacgggtgctactggtctatcgctggagaatgtgcaagtcgcgctgggttttgttccagatgactcgtacaaggttgtgattcgttgtaaagatactcaagtggcgcgactatcgatttcggaccatggcgagtacagcaagcttgtgaagtgcttgagcttcctggcgttcccgaaaagcctgctagatgcattttgcttcgcgtattctccaactgtggcgccatccgaagaagtacagtttgatattcgtcaggagtacgggcgcatcggtttgctttcgatgcccgaccacctgcgctgcatcgaccagtctcccaagtacacgctgtgtgatacgtatccgcggcatcttatcgtgcctgccgacatctcggacgttcgcctgaaagcagcagctacgttccggtcgcaccaacggctacctgtcgtgagctggatccaccgcgacaacggagctacaatcgttcggtcgagccaaccgcttgtgggtttgaagtctgcacgcagtggagaagatgaactgctcgttcagctgctgtgctgttctagcaacaagaaagcgttcggacgctacgtgatcatggatgctcgcagtcaacttgccgccgtgggcaataaggccatgggaaaaggtacggagatctcgagcaactaccgcggagctaagctcatgttcatgaacgtcgagaacattcactcggtgcggcagtcgcaactcgcacttgcagcaatcttcgagcccaagaagagcgcgagcgaggacacgtccagcagcttctacggacgaatcgacagttctggttggctacgccatgtgcgtctgcttcttaaggcgtcggtggagctggcacacacagtgaacagtggcacgtcggtgttgacgcactgcagcgatggctgggaccgtacggcgcaaatggtagcattggccgagctcatgctggatccgtactaccgtacactacgtggattccaggtacggtacttactgcaatgttcacaattcatagttcattatgctgacgttgatcatgtacaggtattggtggagaaggagtggtgtagcttcggccaccagttcgctttgaggagtggccacgctcgcagtgacgtctcgaatgagcaacgctcgcctgtgttcctgctctggttggactgcgtttggcagtacattcgccagtaccctacggaatgcgagttcaacgagagctttctgctcacgcttgctgaccacgtctactcgtgcaaattcgggacgttcatgttcgactgcgagcgccaacggtaagtccctaccttcactgactgctatagctgcctgaagacgggtatctcactctcgatgccgcaacaggaaggacttctttgccaagcaccgcgtgttctcgatctggagcgagatcaacagccagagcgagcgcttcacgaaccacatgtacgcgcccagcgaccaggccacggtgctgtcgcccagcacgctctccaagaacatcaagtgcgttccaacgcttatgccacttccatcgacaccagtgcatctctaacacctttgctctgtgctgctgcaggctatggaagggctacttctgccgctgggacccgaccgtcatccctcccgtccctgcgttccaatgctactgatcccgtcctccgtcctgcacgaaatccaatgtgtagccatgtcgttctgcatcattcgtctacatttcttgcacaacttgataccctgtagtagtataacatttgacagttagtagtgccttggcattcattgcgggacgcgtcagccgcagctacgatcaccatggcgcttcctcctccgccggcgctggccgccgtggcggccccctgggtcctcatgttcatcttcgtggtctgggcgttcgtgcgcggcttgagctgctcggtccctcgtgctgcgcgtggagagaccaagggacttcgcgtggggttcctgcacccggacttcggcatcggcggcgccgagaacctcgtggtcaacgcggcggtggcgctgcagcagcgcggcgctcacgtgaccgtgttcacggcccaccacgacgtgaaccactgcttcgaagagacgcgcggcgacgggccgctggcggcgcatgtgcgcgtgcacggcgactggctgccgcgcacgatcctgggcaagctctacgcgttctgcgccgtggtgcgcgtgctgctcgtgacgctgtgcgtggcggtgtactacatcaacgacctggacgtgttcgtggtggaccaagtgtccatctccatcccgttcctgcgcgcgctgggcaagcctgtgctcttctacggccacttcccggacaagctgctctgcatccgctcggactcgccctggaagcggctgtaccgcgtgccgctggattatttggaggagatcacgacggcggcgtccgatatcattgtggccaacagcaagttctcgcgcggggtcttccaggaggttttcccgcgtctgcagtccaagacgctcggtgtgctgtacccgcctgttgatgtcaaggcgtataaagctactgctgaggcagatgtggagcgcgactccggtctctttgtgtcgctgaaccgcttcgagcgtaagaagaacgtggctctggccatcgaagcgctcgtggagctgcgcaaccgactgccaagcgacgagttccagcgtgttaagctcattgtcgctggaggatacgacccgctcaacgctgagaacaaggaacacctgattgagcttcaagatgtggtagccaagcacagccttggagagcacgtggagttccgtacgtccgtgtcgaactccatgaagctagagctgctgcgcaaggctcatgccattctgtacacacccaaccgtgagcactttggcatcgtccccgtcgaggccatggcttgtggtactcccgttgtggccgtgagctctggcggtcctctggagtccatcgccgatggcgagacgggcttcctatgccagcagaagcctgaggctttcgctgaggtcatggcagagctctgcggacccaagcacagcatcagggttgtcgagatgggcgcgtgcggcagactccgggctcagaagctgttctctctggaaacctttggcgacaccctgctcgatctggtgaaccaggccgtgtacggcgagaaatcggcgtagagtagttagtggagctcataggcattggtatttggtggtgtctagaggtgaggtgtagtttgaattcaccttatactttagccgacgggaacttggaatcaaattctgtgcagatatgtagcgtgtaagtgtagatagataccttgccatgaaggtgtgcggttagcagcccccgcagaacagcgccttgcagaagtgcgcgaaaccagacggctgacggctgcgacgctttcgagatcgcttggagcaactcgaggatgaggcggacaaccgactgtccatctcgcggcactgcgtcacgtacttctgcagcatgggcgcgttctcgtagtaatgccgcgagtcgaaatgcgttggtcgtacgcgatctcggttcatcagctcctgcaccggtagagtgcctgagtcggcatgtcgggacttggggttcactgctggtagcttcaggtagcggcaaatggagttgcaccgatgcgacgagaggaacttctggaagcccagaacgccgagattgcccttgccgaagtcgtggccgttgagtgtgtggatttgcgggtccgtgtacaggtcgccgactccttggatgtcgacagccagcaactcgtggttcgaggcctcatacgtgaagtgagagaaagcttgaggtgtgttgcgctcgtcgtcactcaccgacccgaagttgttattgtgcttgcggtactcgccagggatgtaggcttcaactgcgcagagtgcgccattccgctcgggcaactcgagcacccaagctgggatgaactcgacgcgcttgggtggcgtgtacgagttgtacacttgcgcgtagtgcgcgcagtgagcttgcagctcgatgtccctgaaatacgtctgcggatcttcgtctgggtcgatggccagcttggccacatagctgcctgtgtagcagcctccattggacaagctcgcggagctctcaatgctgaggtcctgcaggtgatagacaatccgcagacttcccttgctaaaaggtgtctcgtccaagttgatgcacacttgggtagtgctccactgacgcgtagcgtagttgaacacgtgcttgatagcaagctccggactgatctcacggaagtccggggcgtgcggcacgatcagcggcaaacctgcagtcacggtaataacaactcacgtgtcagtttctagacttcgtggccttaatgaaccataagatccacgcaccttccgtccgtcggaacgacatgcgtctcctctgcgtgaccgtgttctgcgtgctcgacgccggcgccagcgacgagaacgtgagttcgtccacgatggcacatttgcgtctgcacagcaacaacaaccgtgtcaaggcccatccctcctttccttcctcccctccctcagctcaactctaccactcactacacaccgttcgtattcctcctcggtgatgaacccctcgtcacacagcgctcggagcgtcgagatgcgcgccaagatgctgtcctgcaggttgccggcgatctcccgcgtgcgctcgaactgcacggtgccggcgctgtccacgctgctgcggcgcacgctgcggctgcggctggagcccacgctccacacgtactgctgcgaggccgtgtcgtcgtcgctgctgtcgctactgtcgtctgcgcatgcctgcggctcgcgctcgcccgcctcctggtggaacagcttggccttgcgcttctccgtgggcgtggcggccgacaccgtgtggtagaaccagccaccgccgccgccgctgagcgtcttggcctcccccgtctgctggccgccgcacgacgcgcggcggggcggcggcgtcatggacaccggcgcgcgcatcgccatggccatcggtcggtcggctcgaaaaagatcggcttcaatcgccgccgaaactgctgcgcgcctcgtagaataatggagactgagagagcccaaggcaggaatgaagatatgatctctgccgcttcacttcaacgaagaccgagatgagctgctgggtcggcgagtcagataatagtcagcgcgcgttgtgaaagtgcgtctgattggccagggatggttttatgattcagaaatagctgcatttcgtggcaggtgattggtcaggaatgttttttatccccttgactaagacctcatgtggcgcacttcagaagttgaagccgggggttgcgcctccgggtcgtctgacgtgacggtccatggggtttcgtcgatcgactccgtatcccgactcgggctccaagagcgtggggcaatccgccggccgccatccagtgcccgaatggcgtttaacagggcgaaacaatcatggccaacctgccgacgctggatgccaaggtctccgctagtggccacgacattgacacagtgctgccgagcgagttcgtcgtggctgcgcgcgtcaaatgcgcccggttcgtccctcgctgggtgaccaagcgccggtgggtggtgctgcgcggctccaagtcgccgatcctgagcgtgtaccgccaagatcctcgacgccttgagcccggcgccccgctacggatgttgctgcttggagaggatacccggatgcgcgtagtgggagagaagcgtctcgtgctcgtgagctcgagggtgcgcaaggacgacacgctgtcgctggagttcgagaccgccgagcagcgacaactcgcgctcgacacgttgagccgctggatcgcgctcgcagtgctgctgcagcgactgtcggcccacgagagcatcgccaagagccccaactcggcggtttacttgtgccacgactgctacgatccggcaaagcagtttgtgctcaaaagggtgcaccgctttcgctgccgcgacgaacttagcctcactgcgcggctcatgacgttgagtcgggagaaccgggagctggggcggttcattcctcggtactccttcttgtttgaagacaacaaggccaagtgtgtgaccattgtcatggactattaccctggaggttcgcttgctgatcgggtccgagagcgcggaccgcttcctgaagcacttgcgtgcaacgtgctgattgcactgtgtcgagcgctgtccctgctgcacgaacaccacgtgctgcacttggatgtcaaagccagcaacatcctcttcgatgacgaccagagcggcaagttcagcaacttgaagcttgtggattttggcagtggcgcatgtttggacagcaactccagtcgcaggaccgagctttcagagaaaatggcaagtgcaggtacttacgggtgcatggctccagaacgctttcgaggctgttgcggtcctgaagcagacgtctatggcgctggtatcatgctgtatcacatgctggcaggggttatcccgttttctggtgcagacacttaccagctcctggcgcgcaatatgttgggcgatgtgagctacggggagaagcagtgggagctcgtgtcacctcagctgaaagatcttactgctcggatgctagagaagaaccctgccaaaaggatcgcgctcacggagatactcaatctgccttggctttcttcagagcccgagtccatcgatgccacaatgcccgaaatcatgttagtatcatcaaaatgaaagttcattttacccgggtcaaatgctcacgttttcgcactatctaacgtcgcagtgagccctcgaaaacgcgcttaagcggacgtggcagtctcgtacacttgcagcagtgcatcatcacctcccgacactagtcgcgatcctgacgagttgtacgcaacgctccagacctaccaaacagctcagtcagttgacgtgttcaagaaaacatgcatgaatcggtcaagcatgtgcatacctggtctgtgtgggtatcgaacgtggtcaaacagcgtcgagtgccgatgtcccaaatcttcacgcgccggtccgcaccactatcaccagcgttcaaacaaaagaaacacaatgttaggttaccacgatatgctacataacaggtataccaacagcgtacccagtcgcaaactgtgtacaatcgggcgagcacgcgacgctcagcacccaggagacgtggccagacagagtggcgacagcgttgtcatgagcactgcacgcggggaagatcaaacgcaatagttagcaactttagacaccattatttggaaatcaacagaccgggaatactcccacttacacatcgtagacattgacgtgcatgtcatccgaagcggcaaatagctttccatccggcgagtacgcaaccgaacgcacaggcttggtgcggtctacatccaccatcacaatacacctcatgagctcgaccatcccatgtacacacacaaccaccattcccgcacaccttcgtatttgtggacaagcgatcccgtctcgacgtcatacacgccgacaaagccatcgaatccaccgcacgcaacgtgctttccatcgggggactgcaaaagcaaccactatcatgtcagctcacgccctcacacaacgccaaaacctcataacacgtacgtaggccacactcagcacgaacttggcctgcgtagagatctcctgcgcgattttctccgtctcgatgtcgaagaagttgatcttcccctgctggctgccggacacgagcttggtctcgtcgggactataggccacctgccaaagctcacctgggccggcgtcgatggtcttctctacagcgcccgtcgagaggttgagcacgcgcagctggcagtccagcgagctggtgacggcgtgcgtgccggctttgttgcccacgatggagatcgtgcccagcacgtggcccggatactgctgcgagatggacacggcgtcctccgtcacgtccctgcagcagcaataacaacagcaccgtcaacccagtgcaccaatctcctccccctctgtgttgtaatattccacagctacgtttcaacgcaccaggacttggccacctcgtccacggatccggtcagaatcttgtcattggacgtccagaacgtgctccagatgccgtcgctgtgcgcgttggggaactggatggaggcccggtactgcgcacaagcggtagaagaatgcactagagggttagccacgggctacagaccgctagtagaggcaggaacaagctccacagcgctcgcgtacgttcgctctcgccgccatggtcctgtcagcgttgttgcaaatggctcagaggcaatagaacgtacttaagtgagacacgtagtaccgtaatcgatcggatgatgaccgggtatcagatcgatcggcagctgacatttttgacgatgctgcgccgcacgctgccgctgctgcgcgcttatgcgtggaaggaggtgccgtacgtgacgcagtcgccgcatgccttgcaggcgctggacatcgccattccgcgcaggattcctccgcgcgccaagctgcctacgtgcgtgttcgtgcatggcgggtcgtggcagcgaggggacaagagcggcggactcaaccaggacatcgacgaggcgttcgtgcgcgctgggtaccttggcgtctcggttaactatcggttgtcgccagaagcgcagcacccggagcatgtgaaggacgtggcagctgcggtgacgtggttgcacaggaatattgcaaaggtgatggagttctttctggcttggaggtagattggagattggagttactgatgatggaatttggcgatggcagtttggcggtaacccggacaagttggtgctggtgggtcacagtgcaggtgcgcacttggtcatgcatatcctggctgacccacagtttttacaagcagcggggatggagcagccggttgacacgttcgtgaaaggagctgtgggaatctccggcgtctacaacatcgttcgactcgccaacacgtcgttttacgggacgctggtcacaaatccgccgtttggcgaaagggttgagcaatggcgagaggcgtcgataggcatgacagtcaccagagtcggacccaactcgccactagccaaaatgccactgctcctagtaaatgctcaagaagatttccactttcaagaagacgcacaggagctggagcgatggctatccgcagcaggaaacgtaaggaaccaagctaattgctctacgtattgcttcggtcctcactaaccgattctgctaccacagacgtctatcgagcggcacgtcgtgtccaactgcaaccacttcacaattgtccaccatctcgccaacgaagatgccgataccaaccagaccatgcagctcatcaaggatttcgtatccgatgtcgccgaccccgacgatgtcgcccctgtgctctagagccacaacccaactcttcaactttcaagatagaatcaacaatcaactccctcccccttcaacgacaacttgcaatttctgtacgtggcattgacgttactgctttatgcgtccgtcctcagtatcagtcgctcgctcagacctgcttccgctccgtgaaggcgcgcatgacgcagccggatccagccttggccgccagcttctggtgccactccagcatggccgcgctctgcgacgccatgcccaagaagcgcatgatatacttcatgagggcgtcctccagcgcgttgttgagcgagtcgatggcgcgctgcatctcgcccttgttgcaggccagcagcgccgtcatcaccacctgcgcgttctccgttctcaacgcgtcgttcttggactgcagcggcgggtcctccagcgccgcgcgcaccgcctcctcgttcttgcgctgggccagcagcccctgcacctgcgccgcgcgggccttcacgcccgccgccatctgagcctcgtccgccatcttcagcttctttctgattgtgtctcaaaaagagggcgtatgattgtcaactgcctaatcggataccgtctttgacaggggtagagctccgcttcaacttgactcgaccatcaagtttatcagcgattgtgttgttgctgccgtgaatgctacgatctacgttagcccgacgttgaagcaatgagcacgcagtgtccaagacactgagaatggctatgagtcaataagaagtaagcttgttgtcacagtaaataaaagtagatcgacttgtgccgaagttctgcggtagaacctctgctttcgcctttccagagcggcttggacacctctcagacactgccaagctgctttgccggttgtgccaagaccgcaatgcagccacgctacatgatgctgcaaaatagaggaatgggcacaaagccgtacgagtggtcgctgctcaatgcaccgaaaggcacaacaacagcattccacgtcagcattttcaagtccactagccagagtacagcacaaaagactacgctgcaggacgtacacaacaactacggggcggcgctgcagcaggatctggttgggcgcgccgcacactgtgcactggaacgtggagccgtgcgtcacgttgcgcaccacgtgcgttgtgccgcagttgccgcacttgtagggcagctcggactgctgcacaggctgcgccaccgccatgatctggccctggtcgtactgcgcctgcagctggcgcgccatctcctcgtcgcgcgaagtgtcatgctagcaagaaccccacccaacgtcagctaccaaggccatacaccaggccatacagcgaagcacaaactacctggatgcttgtcgaaacctcacgagcccgaggaagctgcgggtacatgggcttatcgccgccagaggtctccatctcgactcttctctcggcttgtctctttgttgctgttgggtcttcttcttgaggctggactcagaatcctcagacatcgagtaacggccaatcagcgctcggtggcgtcatcccaatcaaaagtgtatcaggagcatggggctgctggatctgctggcccaggtggagcgtctgggcgtgggcgtggcgctggtggcggccgtgctgggcgcgctgtacgcgtggcagcagacggtggaggatggaggctcctccaagatgctgcgcgacttcaacctcgtgcgcgtgctcaagcggacggacacggagctggcgctgctgggcaacttcaggagcgacaaccacaagaaggcggcggtgctcgtgatccagacggcggccatggactctggcgctctggaccgaatgctggcgggcatgtcgttgcatgagatcctggtgaacgatatctacagcacgttccagggagacgtggcgcgagatgtcaagccgtacaaggtgcgggaatgttgcaataggcgtaggaagagaaggagagggatggatacaatgtgtgctgactgtgaatgaatgttgtgcaggtgaacttgatctacccggcgacggagcggcatgtgcgcaagcacacggaccagaacttccacatagtggtggagaccaaggaggcgtacaggatgatcaccaagccgtacatcgacagtatccctccggagaacatcgagtgggtctacaatatcttggagcagtaagtgagggctggtgatttttgctagcaggtggcgagatgtggtgcactgaccgctatgtgtgtgtatgcattgactgttgcagcaagagcgagtcggaacgtattatcttcgaagactcgcacccacgcaatggttttcttctgcttcccgacttcaagtggtcggaccccaccaaggtgcttccttcgctgttggtgctaaagggtttcgcgtcatgatacacttacggattctactgtttgatcttccagttggagtcgctctattgtctggcaattgttcacgatcgatcgcttcgatcgcttcgtgatctcacgggatcacacttaaagctgctgcggaatatccggtacgtggttccctctgtttcgatagtgtacattgaagttggcgaatcctgatgttgactctttaactgcgaacagcaatgcgagcttggaagtcttgagcgaaaagtttggcgtgaatccgagctcgatccgcatgtacttgcactaccagccgacgtactaccacctgcatgtgcacttctcgcacgtgaagatgacccagggtgcgtttcgaagtgttgcttgaagaatgtggaccatgactaacttcgttcgtcgttgcttcgctctgcgtaggaacgttctcgggcaaggctgtactgctggaggacgtgatctacaatctttctgtcaacagcgaccactacaagaacgcgacgctgtcgttcgtggtcggcgagatgcagcacaagcaactgttcgagcttttccgcgagaagcgcatcatttaatgcacgctagacaatcgcattgctccagttagatgcactcttgaaggcgtccgcacgggatcatgcctagcaggcgccttcaagagtacgaaggactaataccatgtgcttgttggaggtgtgtaatagagataccgtacccattcgcgtaaaataccaactgcaacgttcgtctgcaggtcacccatctcgagcatacaattgccaagtataacaccaacggcggaacgcctccaccggcggaaaataacggtcggtgggcacatccacaaaaattctcttcgcctcggccattgcagaacttgctctgaaccccacagacaatccgccggacgatctctctctcgctcctgtacagccactgaaaatgacgctcctggagaagctcttgggcagcacgctggtctcgcggcgcggcgagacgtccacgctcgaggcgctggcgcacaagtcggtggtggggctctacttcacggccagtacctgccacccgtgccgagccttcacgcccgtgctggcgactgtgtaccgcaacatgacgctcaacgcgtacaagtcgctggccatgaaggagcagctggacgtggtgctgctgtccaacgaccggagccccgtggccttccacgacgcgctgctgcagacgccgttcctcgccgtgcccttccaccgacgcgacgtcgtgcaggacctgtggaagcgctacgacgtcaagacgatcccgacgctcatctttgtggacgccaacggcgacgtggtcgagcgcgagggccgccgcttcatcgagaataactacacggacctgcgcaagatctgggagcacctggcgccgtcgctctcgtcgtcttcggggccggagaccacgattccgtgaactctcgcgccgaaggagtagggctgcagcccaagatattgcttaaccgttctaattcgtatcattaccacattctctatggtactttctgaaccatgttactcgatcgacgaagccatcctcttgtcgtcgctcataaaattcagcacagcgaagtcccgtccaacagtaccgggctgcagcaaacgaaatgaatcagtctgcttcagcataactaccttacttcacctcatatcgttgatccaattttatacaaaaccgtgctctaaaccccgtgctgggcaggaaaagccaacgtgcagctccagcagaattgctgcgtatccggataagctggggaaatgcagggcggacacgattcctcgagggctaagctgttgaccacgttgaagcccatcgagccaatcacggagcagatccgcaccgcttcagccttggcccgatacactcatcacggtctcacaaagcatcacgtccggcatgacctctcctccgctccactctgcaatcggcggcatctctctcaagctccagcatgccgtccttcccacctgccagcaagcctcgaggtcccgtgctcgtcaacgacgacgaaatctacggcaccttcgacgggcgtcctagccttcaagacacgaacacagaagcagctaatggcccctccagcactagaatcagtggactgctgcgcgttgctgcggtcgcgggacttgtcctgcttgcagcagggtacgtgacgaaatccagcccaaccatcagcgccggcgacggaaacaatcgtgtgcaagctgcagctactgtggtaaacgatgaagttgtgtcaaagttgtccgtcgccgatctccaccagcaattcgttgccaacgtcgacgccggcaacatgcgcgagtacttgcacaagtattcgagtgccccacacagttgcggtacggagcaggactacaagacagcgttgtacacggccgagaagctcgagtcgttcgggatcaaggccgagatcaaagagtactacacgctgctttcgacgccaatccatcggcgtcttgcgatcgtggagcctgcgggagctgcgcgcgagctgaacctgactgaagcgtccgtgcctggagatacttgcacaattgacgacagtgcgctgccccctttcgtagcgtatgccgctactgggaacgtcacctcttccatcgtgttcgtgaacttcggcaagcaggcggatttcgagtggctcgttgccaacaatgtcacgcttgagggcaagatcgcgcttgtgcggtacggcggcaacttccgcggactgaaggccatggccgctgagcagcacggtatggtgggcgtactgatttactcggaccccaaggaagacggcttcgtgcagggtccagtatatcccgaaggtccgtggcgtcccgagggctctttccagcgtggatcattgacatacctttcacttgctgccggagacccgtcgacgcccggttgggcatctgtggaggggtcttaccatattccgtacgaagaagtggagacaatcccccacatccctgcactaccgctatcgtacggccaggcacagcatattctccgatctctgggcggcaaggaagcacctgcgtcgtggcaaggaggcttggcgctgccgaacggctaccgtattggcgatgatgaagcgactgtggtgaatctggacatcgaaatcgacaacaaagtgggccctatctgggacgtcatcggaacaatcgaaggctccgaggagcccgacgagctggtacttttgggcaaccaccgcgatgcctgggtatgtggcgccattgatccaaacagcggatcgtcggtactcctcgagattgcgcgcgggtatggcgagctgctcaagcgaggctggaagcctcgacgcacgttgatttttggctcttgggacggagaagagtacgggctgctgggtagcactgaatacgccgaggagaacgccgaactcttcaagaagcaggctgtggcatacctcaacgtggactccatgatgggtccgttggtcagcgccagtgccagccccgccatcgcagagtttctttaccagacggcgaaggacgtaccggcgaacaaattccgtggtaacgaaaccgagagctcactgtacgagcaatggaccaaccaagctgttgtccgtcgtcagttccttcatggtgacggaactcttggccccgagcacttaatcagcttcatgggctcggggtcagattacacggcgttctaccagcatctcgggattatctcggccaacttgggcttctcgctcgctcgcgctccgtacggcgtttaccacagctcaatggacagcatcatgtactcggagctgtatgctgatccaaactacgccacccacgtagctactgcgcaatggtgggggctgcttggactgcgacttgctgataaccgagtgctgccgtttgactttacgacgtacggcttcgtgatggtggaggatctggccagtctggagcaacaggttgcagcgctccctcggcccgacgtgaacttcagtgagctgcgtagcgccatcgctcgcttcactgcaagtgccaacactttccacgcgcagctcacggcattcgtgtcgaacgagaccctcagtgcggacgccgacgcattgcatgcttggaacaagaaactggtgctgctcgagcgtcacttgatcaccaaggaggggcttccgcaccgcccctggtacaagcatgtcatcttcggccccggattctacgaagggtacgctggagctgccttcccggggatctcggacgccattgcgttctacgatgacagcgaaaccattcaagcccatgtcgatgaggtggctcgcattgtgaatgacgcagcagactatttgttgtagaagggacatttccgattccgacagcttggtcaataagcgatcaacaatgtttcagcacgtggattgcccagcgatcagtgccgcgctgatagtggcggtgctgagtggactgtggctgtggaggcagtcgactgtgggcgctggatctaagcggctcaaggatttcaaccttgtgcgggtgctcaggcggacggatacggagctggcgctgttgggcaatttcaagagcgacaacgaaaagaagatggcggtgctcgtgatccagacggcggccatggactcaggcactctggaccggctgctggcgggcatgtcattgcatgagatcttaaaaatgacatttacagcacgttccagggagacgtggcgcgagatatcaagccctacaaggcatggaataatctgagcagcagagagatcatcatcttaaaacataattttgatgtacttttgtgctggatctggcgtaggtaaacctgatctacccggcgacggagacgcatgtgctgaagcatacggaccagaactttcacatggtcgtcgagaccaaggaagtttacgaagcgatcacgaagccattcatcgacagcattcctgcagagaagatcgagtgggtttacaatatcctggaccagtacgtttaagccattatttaccgggatcgattggggtaccatcatgcacttactttactcgctgtctatattgtagcaaaagcgagagcgagcggatcatttacgaggatgcaaaccctcgtgatggatttattctgctgcctgacttcaagtggtcgaaccctgctaatgtacggccccaacgctgggatattgcaggagcctctccatgtctgacacttcgtgttacatgcgggcagttggaatcgctctactgtcttgcgatcgttcacgaccgctcgcttcgatcgatccgtgatctcaccgcctcacacgtgaagctgctgcagaatatcaggtttgttattgtgcattttggtgttgtttggtctccgtgcactttgcccagctttacattctcaatttcaaacagagattcgagcctcgaagtgctgaagacgaaatttggcgtggagccgagctcggtgcgcatgtatttccactatcagccgacttactaccacctccacgtgcacttctcgcatgtcaaaatgactttcggtaggtctccgtcgatcaatgcaacgattgacttcgaatgaaatctaatgcttgacgattcaatctacacagggacattttcgggcaaggctgtgctgctggaggacgtgatctataacctgtcggtgaacagtgatcactacaagaacgccacgctgtcgttcgtcgtcggtgagatgcagcacaagacgctgttcgagcttttcagcgagaagcgcatcatttgaagccctctagcgagaggcttggtgcttgctagcgtgggactagctgtagggccttggcttgccagcagattcagaattttttgggctcattttgcatttggcgtcgaagtggagacaacacgaaatggacatttctctcttctccccgggaactcaagaggtgtaattcttcacagctcgtataaagtggctgctgttgcatactcttaatgttgtcatgttcatgttctgcaggtgctgaacgatctactgacggagcgcggcctcatcgagtggcaagttgtacgcggcctccgcctttcctccgactccaacgaagaagtggatgtgatttacgggtacgcattgactgcaagtctccaagaagaacgcatcgaccgcaagcgcaagcggaagaatggaaaggcggccaacgacaacgagcagccaacgtggagctgcttcctggtgcttccagccgtctcgtactcccaagatccctccacactcagcattaagcggtgcgttgtacctcactctcgccccctgcaattagcacgtgacactaacgcacaaatgctatcgtgctggggacaggctcctagagcttcaggaatgcgctgatgcccatgagcctaccggagctggagcagcaacgaagcagacgttcctgtgcctcacagacgccgccaacatcaggtaccgccctactataaactactttggcttgtgctcaccataacgacagcgttggcattaactagctttccttacttgcgccccgtgcagctactactcgctccatgcgccagccatcttgccctgagcaatgttttggccatcactccctcactataatgacatacgtccgttctgatgcttagtggttgaagttcgaaagataatggtttgcgcatcagaagtgcgtcacttcagctttggctccgttcggctctcaccctgctgcacattgtccccctcaccactaccaatgctgtctccattgcctcgaagctccgtgctgattgcgggacgccagaagctcctgcagtgtcaagcgcagcgctgcgtgacgacgatcaccacgggtccgtcatcttccaagaccaagagagaccgtcccctgccgctcgagggcatccgagtggtggaatgcggccacctcattgctggccccttcgccggtaccattctcagctacttcggtgccgatgtgatcaaggtagaaccccctacgggcgaccaggtgcgcgactaccgtgagctggactcgaccaagacgtcgctgtggtggtactccctcggccgcaacaagcgctcggtggcaatcgacatgaagaaggaagaggggcgcaagctgatcgaagagctcatcgagcagagcgatgtgctcatcgagaacttcaggcctggtcgcatggagaagtgggggctcggtccggatcacttcgagaagtctaaccccaagctggtgtacgcccgagtgtcgggctttggtcaggacggtccgtactcgtcgagaccgggattcgcttccgtgtgtgaagctatgggcggctttcgctatgtgaacgggtttgcggatcgtcccccggctcgcccgaacctcagcatcggcgacactatagctggcatccacgcagctctcggcattgtcattgcgcttcttgggcgtgagaggggcgctgctgctggtctgagcaacaagggacaagttgtggatgtggctatctacgagtccatgttcaacttgatggaagctgtcgttcccgaatacgactattctggatcgattcgtgaatgctcagggtcgaccatcacgggcatcgtgccttcgaacacgtacgtcaccaaggacaagaagaacgtcgtccttgctgccaacaccgactctctgttcgtgaagctcatgaacgctatcgggcgggaggatatggcgacggacagcaagtaccggacgaatgctgaccgtgttgtccaccaagcagagatcgacgctgcgatggtggcttggactgctacccaggagctagacacggtggttaaagtgatggagaaggccaccgtgcctgtgggacttgtctactctgtggaagacatggtcaaggatccgcagtaccagcagcgtgggatgtttgaggaggtggaaatcccagatggggataacacgaggaagttaagggtgccggcgatcttgccaaagttgaaggctacacctggcgtaacgcagttcgctggacgaaagcttggacaggacacacgccaggtcctggcggatgtcctcggtcggtccaagcaggatatcgaacgtctgctggacgaaaaggtagtgttcgagccgtagctggtgggggtgggtagacgtacgtatgtgtggcatttgtgaattaaccaacgaatgcagaaacaatggttcagacagctatctactgcacatcagcgacaataattaatagtccgtgttgagcgccagcgccacgccctgcagcacccagtgcgaggcgtgtacaagtccgcttcgacgacaagaccaacccccatagcattccgacgactctgcgtgacatacaccggcgtgaaggtgttctgcagcttgagtcgactgtcctcgatagggatgacctggagaatgggcagctcttccacgagctgcgtgggccgttgtggcgctaggcacccgccaaggacgcgccttcgaggaagagcccaagcagccagtgtcgctgtcggcagcagcgggaagctgcgagtcctgcgtgtagctggtgacgcgcgtgtacagcgtcgacttgtccagcagccagttctttgctcgacatgttgcctgcaccagcgctgtgaggtatgcccaggccagagagccatatgactcgcggatcgccgtgtgataccactgcttgaatcgctgagtaaagtgctccatccagctcccgaggggcttctccgtcttggaaggaaaccgttgtagagcgcgttccccactgcatccagctcgtcgctcctaccaatttcacccacaagtgccttctgaaggtctccgagcgatacgcgcatccgaggtgccgaccatgcaggcgatcgtgccgtggttgaacaagggctggaagctgcgagagctcgtattcagccgagtcacgtgcatctcatggccgaggagcttaagaatgtcaccactcgcgaatgctatcaggtgcaagagcctgtcatcgtcgcgccgaacctggaggttttggtcattgaacactgccccatgaacaagttcaacgccgacacaagtctgccgcagctcaagaagctgacgctgtcgtcgcgaaacttgtcggcgctgcaggcgcgtcatctgatcaagaatacgctcacgaggtcactgcgctggaagtcctgagtcttgcccggtgctcgcagcttgattaggtgctggtggatccaggagatcttcctgctctgcggaagctcgacctgagcagctgtgcgaaactcactcgagtgcacgtgacttccaagcggctggagacgctcgatctgtcgcgcaacgacgagttgcagttcgtgttactggacctcgagcgcgtggtggacctggatttgtcgttcctcaagagcctcacccgcttgtacttccgctcgccgtcgctgcggcgtctgaacctccgcggctgcgaccaactgaggcggaacaccacgagcgtgcactgtccgaatctgcagttcgtcgtgcttcaaggcacatcgctagaggtcgacgacttcaataggggcgaggtcaacgacgaggtgttcgcattgccagtcatcgcagaccagcagcacttgtcgacgctgcgtcaaggactggcgcgcctcacgcccgagatgagcttccacgccgggtggagggaccccgtgtacggctactcacctctggccaacgcgtgctcgcagggccatctgctctgtgtgcaggcgctgctcgcatacggcgtggactgcaacgcccgcgactcgcagcgcaacacaccgctgcacatcgccacggcctgtggcaagagcgaagtggtgcggctgctgctgggagactccggcggtggactgtttcgccaagacattcaccaaggcgcaaacagcgatggacatcgcacgccactcgtatagaacatcggagggacgaggacacaagtacattcagtgcgtagggcacattgaaaaggtacaagacttgatgttgctggattggggtagttggtggcattgttcactgacggtttggtctgatttggtttggtaatggtcattgtaaaaactctgtatctactcagggtggctgtatgagagatcggacaagtttttgtcgattgcgtcgggaatatcaagcttgcactcgtggaagaagaggtatatttcaaggagcggttcttgagaagatcttttagtcgctaatgtgtttattgggcccagatacgcgatggtactttggcctgcagcgcgaaatgctgtcaagatcgatctgttcccgatgagacctggatatcggcgcccacggtacgcgttactacgctgccgtagtgttttcaactttaatctgatcaagacaaacatttgctgtatcgaacaagcgacggagtttaacagtgacgatggcacttggctcaaccgaaaataatttcgcatgtcttagaaggtgtcgcggaagctagacacaagtcgagcgtcggccgatcagtcgacggacttagctgctacaaaccaaggcgaactcgttgcatggaaaacgttcttgaccagcctgcgggtaacgttttctgctgatattccctatgagttgttgtgggtacgttctaacgtgcgatgttgcttgttggtcaacgccccagtgagtccgatcacaaccgctttcggacgtcagcgaattcctccaccacaacctgctcggccgactgctatgtcggctccaagcccaagtcctacccaggccgcgctgcttcaggagcaacgcgattaggagcgagctcttcgactctctcttgaggaatctcggcgtcacccccgaacaaactcggcgccgtttgctccacctccttccgacacaatgctggaaaccctcggttactcggaaacggttgtggggcctgatggagtggagattgtgcagcttactcgtcacgatgactcgacggctgctcatggcacagcatctccacccccttccttgagctctcctgcgaagaatactcctgggcaaggtgctggagctcagagcaatgacgagtgcgtgatttgctttgatgggcatcaggaagcggtttgcgtcccatgtggccacaacgcagtctgcatggactgcgcgcagaagcttctgcccggtatgttggcagcaagtgaccgcctttaccgtgtttaaggtggtcgatctcggtattgtttggaatacatcaataagttttcatgatgaagccctttaatggttagacatgttgtagcttgatcatactactgatatcatggtaccttgtgaatacaccggcgaaaatgctcacggtgcgctgccaccttgtcactttgcatcagtgcttatggcagtggaagtcgcggcttcgcaatggctccaaaacatatagcaccatcatcaggctgaagtgacgttgtcccacgagttgggctcgtacagcccaatcatgaccccgtcgggggaccgcagcgccgctacctgcaccaaacgcccaccacgccagatgcatgttatcaagctatggataaaatcagaagagtcgacaactgctcgagagtatcacacaccttcccgtgcgccgggtacttgatggggccgtccatgatcgcccccagcatcagcagccgcggcacggcgtcgcttaggtccagaatgtcgaagttcaggaacggcgagtagccgctgctgcacgcggcctcactgcagtgcatcatacgcacccaccagcaattagcgccttagttcccaccaatatcgaagcagccctcgcacctctgcgccagcttgatacacagcggcacgcccgcctgcgtgtcgaactcagcgaacgtgtccgacgagcgcagcagcttgagcccgagcccctcctggtagaactgcttggagcgcgccaggtcgcggctcaacaccatcagctgccgcagccggctcatgctcgtccactttgccaaaagttgcagtggcgaatatcggccaatccgcgcgccgcaaacagctaaaaatagcaggaaatcgcccagacatcgagccattgcgcatcatgctcgggtcgggactcaaggtagctgtcttggcggcggcggtggcctgctacgtgcggccgcagttgctgttgcagcctctcattggttcggagctggacggcgcggacgctgacgcgtcgttgcgcgtgctgcgcggcctgctgacgctgctgagctacgcgctggccagcatccgaccgtcctggttctgggtgctggcagctttggcgacgctacagctcgcgctgtgggtgctgcagctggcggaggagtcgttgctggggatgagcgtggaggccgagaagaagctgttcctggcgggagctgtgctgtgcttcgcagccatcgtcagcgtcattctgttcggaggaaagggcgacgccaaggcgcgtttccggtgcgtgattttaggaggattgagaggctgaaaggagagctaataacttggagctgttgttgtttatgcgtgcagcaagaggctggtggcgttctacaccaagcacaacccggacaagctgcgcgaggtggacgagctgctcaagaagtacgagttcaatgaggagctactgttccagagactgcaccgcaagtataacgctctggcagctgggccagagaatcactcggtgatgaagaagattgatgagggcgaattcctgtacgaggaagaagaagaagacagggtagagtcgtcggaagaggaggcggcgcagatgaaacaagttgcctcgacgtacgtacaggacgaagaaacgaacgaggaagaggatcaagcgcgtccatttacccatcagcagagttcaggcagcacaggtagtgaggaaagcttcgaggctgaggagacgaaggaggtggctgtcgctgtgatgcaccctccggagattgaagactacgatctccttgagggcacgcctcccgtgtcgcctcgctccgctgagaagctcgcatgtacgcatcgacagtcgtcaactcttattaaggatgcgattgccctggcacgacaagcgcagcgggagcgcatcgagcggcgtattgctagcatagcgtcgaagtgtggcgacggttacgcggggcactaattcgatggtcatgggctcggtgtccgcaccatgagtgcatttgtggtgaaataacgacgcaagaaggaagcagcgaagaagaagataactcaaatagttttatactcgaaaagggttttggattttcattcgaggcactgtgtgttttctgctgtgggtcgccatgctggaattagtttgctgtcggatgcggtttcgtttccaatgagtacgaggcttttgagtgtctgagtgctgcttgttcccgtgagagcttggttgttggatacacctgcacttaatactgcactctctgtttgcgcgactaggctggtgtcgatgttgtatggtgcattcattctgatcttgatgtagttttcgttgacgctgtttgccactttgttcatactgaggattcctcagtatgaacaaagtggcaaacagcactaggcatcttcaccaaaataagaacggccacattaccatgcaaattcttcctcagtgaggtagaattagtgtggccgttcttattttggtgaagatgcctagttctcgagtgcattcatagtcactagcacggtatcaccacagatggcgcaggtcctctgcgactacttcgaagtacgtgcattcacccgccatgatgcgtactacttgaggggctgtgtacggatcaataaagcaacgctattttgactggtacaagggggggggggcttcgcacagtattcttctaggcacaagatactttggatagatagacttaatattttcagagccaaagagcgctgtgggttctcttacagaccgtcgtaatcgcacgtacaggtattaatagtgtttataatagtgttcgcacaaatatttaaaacactacagtactgtacctacagtaattagtctggcccagactaaatctgaatagcagatttttcttactattagtctggccccaacagtgacagactaattttgaattcagactaattatgaacatccaaaagtatccgtttccagtaagaaaatcattatttttgtgaaattgtatgtttttacgtattttcaaatattttttatagtatacctatattttatcgtggctttaaggagaaacaaagactaaatcattgcagatgctgcttctctaacggttagagaaggctattctatgagttcgatgccatgttcactcaggtatctattatgttttccagatattcacaggtcgaagacctgtgcttggccccggcaaaaaaattgtaactttccaaaaccgggtaccaaactgggtctctctttcttaattgtaatatttaggctaatatctgccggaatcgggtacccgtcgataactgcttagatttatgtacattacttaccaaaggctgatactaatcgtttattatttaccaaaacctgcattcaaacacttacggacgctccagtacactcactatgagagcgtcatggcttcgctgaaggcgtatcaatttgaggagccataatcgaccaagcttagctgaagatgaccagcatgacttgtctaggtgcaggctattttttttacatgtcaatttgctcaatactcaatcactcttagccgaagatgcccaacctcgtgtctgtcgccaaaccaatcagctcaactcgacagtgacacgagcatcgttcgtttgaataagacttttttcccctctgctgaagcacccacttccaaggaattggcccattagcgtgttttgtttttgaattgaggatcattattgtcacttactgtagctaacatcctcaagttaaaaggtcaagatcagcgcaccatgcgtctctccttcgtcccgctactgtagctctctcgtctgatcgctagcacacaacatagtacaaaaatgagcacggtataccgtacctgcaaaatgaatgaaatagctctctcgttgctggcgccaacggagccattggacgctgaccagggtgttatgtcaccgatggcctcatcagaccaggcaacctcaattggtgactttcggttcctgagaacccaccacgataaagaagagcggggcttgctttgctggttaccagcctcacaaaggtttggctgaaacatcatttccgtatcgatacacttcgatgtgcgaaactatttgttcaattacgcattctcggccagatgctgcggctgcgaagcaggcgcagtagatgcccacgttagagtcaactaaagagttgggctggtagtgcctttttaaaggattaaaaatcaaaacaactttggtatttattcaattattattataataaccgttatcatcgtccatgaaactattcgtcgacttgtgtaccctcccggagcacgggttgcctatcaggttctgtgcgtgcgagatctggtaaattggctgctctgacttgagcattgatgaaccaataaatactcacagtcttcatgtctgactaagtaaattctttataaatacgcggtagaatatagtagtatgctaagttttgtgtttacagtcgtgtgagtaaaaacaattattttattatgtttatacgagctctcttggaagtgttcggttgcagggtcaaggttaaaattgggtacgctacggagttggctagcgcatgattgatgatgctatcaatcattttgtggagctgttagacgtcggaaagatgcgtctgtcaagcgaaagattctcgcttgcgccccgcgcagttttcctcagggcccagcggcgctggcagcgcaccattctacgcaatgtattgtgtgccgtcttgctggagacaagcttcaacatcaatggatgtttatctcgacgcaagattcgtattgtatgctgtaccgaaacgcagttccgctgccagcaatttgctgccaggtcccagcaggagatcaaagcggctgctggatgagaacaaggctcgagccatagagcgatgtgtagccccaaacacacagcatgcatagcgctctcggcctaataagatccgcacgcgctcttccgaccatctcttctcgtacggtgtgtactttctggcgccaacctgcagcattgcagcactgcagcactcaaccattgctgagcaatgtcaccagcgccatccctacaagaactgtatcgatttcgcgagcgcggaccaaagcagcaaggacgtttgatggagagtccggtagtcacgctgatggtgcgttgggtgtcgtcacacgccgcgggctctggacgtcgagttcatgttgtcgctgcggtgccaacgcgcgcaggtggcgggaaacacgtcgccgcattgccatccgttgcttgctgaagaggtcgccgcagacagagcaagtcttgctccggctgaacaagggcaaaactcaaggcaacttcccactccactacctccactgcagctcaaacactgttgtccgcgaccagcgtcctgatacactgacacacaggcagtctctgtgccctgcccgcagtctttcaacctggtgccggtcggagtcagagccagacggggaagttcggtccacctgccagccctggtcggtacagagagccggcaaaaccgactcgaatatagattcccacaggtttccgccgccagaatatgcattctcgcaggccctttccgcgcattatgccaagcccggcccccagacgtctaacagacaacaccgcagcagcgaggaaggcgtcgagcgcgcgcgtgtttcctccgccttcgcgcctcctcccgctcccgaggctcggccaccccgtcggcgccacctccaggaccttcatccgccccctccgcgtcccccccgccgcgggaacgtcctgcacgcgaggtacgcgccgcgcgctctgaacctccgacttaccgccactttttacgctaattttccgtatttaccgctaatttcccgcagcctcagagcctccagccgtccgccggaggccttcggaccttgccgaggctcagagcgacaccgtggcgtccttccagcgcctacatgggatgcctggacccgacgacgacgcagtagaacagaccgcagccgttaggaccaacagcagcggctacggcctcaaggcggcgcccagcttctccacctctggactcggcagtgtcgcgagcgtgaacagctacagatccagcagcgtagacggccaggaggtggacgtggacgactgcaacgaagagtgcgccgacagcgacatcctcgagtccccgaacgacggggagatgaccatcatgaacgacgacgacgccgacctgagcgaggaggaggaggaggtcatggagcactcgatcgacttctcggtcaacagagccacggtcacgcgggcgggcgtcatcccgtgctgcgtgttcgtggcccgcgtccgttggggcaccacggactgggagatctacttcgggcagaagcagatcctgcggctgcacttccagctgcacctgtactgcctgctgcaccgccacaagttcatgcggggcgtgcacctgccctggacgatctggcgcgagaagcgcgcggagaagcgcgtggcggacgtgtacgtcgtgcaggactacatccggacgctgctcaaggacagggacctacgtaactcagagccgctgctgtcgttcctggaggtgagtccgtcacgcgccatgctgcgcctcggaccgtcgctgaaggagggatatgtgcacatgcgcatcaacggcccgttccagctcccgctgtacacgtgcttcaatcgcactattgaggcgctgtacaggcatctgtaccgcgcgtggatgcgcattgccttcgtgtcggctatcgtgggctttatcttcccggtctgtcttgtgattgtgacgagtctgccgactttcttctcgccccagaaggagctcgtgaactcggattcaggtaccaaggaggtgtccacgaagctgaacacggctggagtcttcttgggtctagctgttctcgcaggtatcatcttcttcgctggattcgtgtacaagttcttccagcatcgccttggtgtcattcgacgatgggtcgttctgaagccctcatgcttcgctgcctaccggaatcggaatgaccgcgagcctagtgaggtgttcttgttcgataagacgtttacggctcggaagggaagctacaggcaaggtgtcagttggatgccgagtggactggttgtcggaagtaaagctggtgacatcgagatcgacacgggacactactacactcgactgacggcctttatcgctctcatgggtgtgtgttacggtatcatgcgtctatcgaacagcatttacgactttgaaactctaagtctggacaagagcttgggtgtgccgattacgaatgcgtccggatacgagaattggacggagaccaacgatatcgagtactgtggatactacttcactgtgccgcatggagtcacagtctacgttgaaagtgatgaagacaatgccgtggtgtcgcagctgcaaatgccgtcggcgaattcgatgacggcaaacctcggatacttttggcaaagtgacagcatgggcaacagcttgaacgtgattacgaatgcggtgggggctggcacaatgatgagcgtggttaaaccaattgatgcgaaaaacgaccgctttttcgagtcgggaacgaactattcgttgccgagcgttggaaacttgacgctggagggtgttgatacggacatcgatgtgcagagctacagcaacgttgacagtttgtgcgcgatttccgtgcggatctcaccagtcacgtggcgctcatacatcttctacatcatgttcctgtttgctggaggcattatcgcaccagttgtaggtttcctggccaactatttcgttacgtacctgggcgtgtggcacccacatgttcgtcgtgaccactggttccgatgcgtccgtcggttgcagaagctcaagcgccacgaaacgtctacgcgattcaactcgtttgcaccgcagcacgtcagcactttagctgatgatgacagcgcagcgattgtagccaaagccaaggccgcaaggttaccgcctgtagcagtgggaaataccagcggcagtgcaattaaccaggtggtagactcggtggtcaagctggaggcggaagccgttgctcgtttgggtagtggaaacctgacgtctgcttcccgggtggacagcagtacgcagtctgaggagtctttcgaagccccgccgccaccacctagtgctgtaagctggcatgtggatgcagaagacacttacgaagccatgtacaaggccatctccaacgccaagtacgagattttgattgccggttggtgggtgtgtccggacttattcctgcttcgtcctggccggaagctgccaccgcgtgaacctgatgaagatcccaatggacagcaagtgaacaaaaccatgttgcgtcagttgctgatgaagaaggcggaggctggtgtcaagatctacgtgcttatttatcgtgaggtaaagctggcgcttacgctgaacagcgcatacactaagcgcagcctgatggtgcacccgaacattcgggttctccgtgacccgattttccagatccaaagtctgggtttctggtctcatcacgagaaaatcgtctgcatcgatcagtcgctggcctttgttggaggattggacttgtgcttcggtcggtatgatcaccatgggcaccctatcagtgatcctagcgatgatcctgtttggcgtggcaaggattactcgaacccgatcatcaaggacttcgtgcgtgtgaacaaaccgttcgaagacctcattgatcgtggttcgcagccgcgtatgccttggcatgacgtgcactgcagcatttcgggtccgcctgtacaggacgtggcttaccacttcattcagcgctggaatttcgtatgctccaagaacgactaccagcttcgaacagggtggtgcatctgcttccgctcgcggcggttcaagttcctgccgaaatgcctcgtgccgatggacttcaatggatggacgctgcagtacccgtcttcggacccggaagctatgctggagcgggacggatcgactcggacaaccattccacttgttcgtgaagattcgttgagtatggtcgaaccgttccaagtggtccagtcgctgaaccccatgtacccgtgcgctgctacgggcccccagtggccgccaacgtcgtcattgaatcctctaaatcccatccgcccaccaatcacgagtgcctcgggaaccgcgggccagttagacgatggtgaagtgttgcgtgcccagcgcggtgagtcgattctccaagtgtttcatccgagtgccagcatctgcaacattcaggtgtgtcgctcagtgtcgatgtggtcggcgggtgtaccaacggaggccagtattcaggctgcctacatggacgtgattgccaactcgaagcactacctgtacatcgagaaccagttcttcatttccggaatggatggcaacggcatcgtgcgaaaccggattctgcaagcgttggtggatcgtattgagcgcgccgtgcagcgtgatgagaagttccgcgtgtatgtggtgatgccgctgctcccggcattcgaaggcaacgtccgcagtcatgagctcacgaaccttcacgcagtgatgcactggcagtttgcgacgatttgtcgtggtcggtacagcctgtttgaggcgctaaagggtgtaactaaccacccggagcagtacgttgcgttcttcggattgcgcaagtatggcatcatgcctaacgggtgtgtgtccaccgagcaaatctacatccacagcaagctcatgatcgctgatgaccggtgcgctatcattggtagtgcaaacatcaacgaccgtagtatgaatggcgaccgcgactctgaaattgcgctcgtgatcgaggacatgcagtacgaggacggtgtcatgaacgagaagccgtaccgacggggtgttgcagcaagcaagctccgcatgcagcttttccgcgagcacttgggcctgacggacgatgacctgtccattgtggatgcgacgtcggatcgtacgtggcaggccatcaaggcgaccgcttcgagcaacacgaagattttcgagacggtgttcgactgtgcgccctcaaaccgcatgcgtgcgttcgtcaacttccagagtattgaagtgacgcagatcttcgaaaatcagcgtatgaatgtgctcaaggtacccggccgagctcacgtgtgggatgcccagaacctgaaggacggcgactacgcaccgtggacggacgttaacggtgtgcccattgctgccgaccgcgtggatctgagagacttcgaagttgacaacttcagggacaggaagaagaagttgttctctatggatcacgacggctggtgctacgcgcgtaacttctcgatcttccaagaggttcgcacgatgaagacggactacaagaagcgcgaaaagctccagcatcttgtggctgatcgtctgatggcccaggtgcgacgtcgccgctgggtcaagaagggcttgctaccgccccggcctgatcctcgtgatagctccttcagcattgcaagtgatgacgaagagcacggacgcttctactctctctggcggagacttcagcagggcgacttcagccgttcgaactccgttagtaccccgacgaacttcagtcatctggataccggcggcagcattgccaacagtgtgagcgtcggaggtacgcatcaaggtcgtcgtctccacaactcctcgtcgttgccgctggatggtccgatcatgatgtcgaacaccactccgtcgcgccccgccgtgcttggggacaacccatcgtacccgaactcgccaagcgttgcgagcttccagacgcctcaaagtccgtcgatgaacgcactccaaggcggtccgcgaagtgtacgcggtggtcgtacccaatccctcttgggaactggtggaggcgtcagaacccgcgccaacactcgcagcgctcgtgggagcttcatcggcatgttcagtgtcactagtggcaaccgaaacgatacggacgatgactcgagcgacgccggtagcgactacggtggaggccacggcattcgcgcgtctctcaagcgctggtactctgcggtggacgtgctggacttcgggcgtcgctccaagttcaacgctgaatacttcgacggcgacgaccacctgaacggcgacgatccgctgctcgaagaaggccagggcagctaccacgctgctacgcgcgagggtctgctgatggaggagggcgcggaaggctcggacgctgaagacgccgactgccagatcagccacgtgcagaccgcggccacagtccgcaaggaggacgagacgcgagcccgtggccagctctcggagatccgcggccacctggtggagttcccgctcgactttttggtggaggagatcctcaagccgtcggtcctgcccgctgacattcatatttaagagcagacggcgtcgacaaggggggtatcgaggaggtagtacacaacgaccagcgtaagttacgatagagtggcaatatatttgagttttgagtttttcgtgggggtttattacgatcattttagtggtatttgtttttaggcataatcggtgaagcatgttcgtgttcgagtccgtcgctgggggagctctggcgctgctggacgtggccacaaaggcccaactgccgtttgaagagtacgtggtggtggctggacgcgtgcagagtgctcgccagctcacgtgtcttggtggacgcgtcaagcgcgacgggaagcgccggctgctggttgtcccgttaatcggccaggctcaagatgcccagactccgagcgtgcaggtgcttgacgtgggcgaggtggctgtcaacttgctgctaggggtgaaggcgtgcttcccctcgctggtgcgcaagaaccccttggctgagcccatggacgacgacgacagcgactcggaggaagaggaggaagctcacatggagcaggaatcagactcggctgctgaagaccctgaagcgaatagacagaagcaattgcaggcggaggcggtggagtacatgaaccaaacgagggtcaaggtgctcgcgtcgctggacgagctctttagtgccttccagattgcagatccgacgaatgtgctggtgtcgctgcgcaacgatccgtcgttgcctaagaattgccagttattgtgtatggactgccccccgctaggcagtgcggaggactcggcgcatgcagctgcgccgcgcgcgttttcaacgtctgcagctccaccggagccgctcaacttcggcgtcttgttcgccgaagtggcgaccagcaagaagaacgagcagttcctgcatatccccgtgccgcgctcgccgcctctgccagcgccggcagctcaaggagatgactgcgtgcaggagagcttccaggatgctacagtgctgacgtttggagccaagcgcgaggctactgcgcacggcggcggcaagacctgcgacgagatgatcaagaacatccgcatgcgccacgcgtcgggcacattttgcacactggttctgccgacgaagacgtgggggcaagtggtcgacgagcacaaggcgttcctcccgcaggtgagcgagctacacggcgagttgcgtctgcgtcgcttgatggggaacgctccttgcggagtcccaatcgaactgctgcttgaaagctaagcaacatcgtgaatccgctgcaagagccggcaatgcgactaaatgataaagagagaggagagcaggttaggactcgtgtagtgttggcttgttgctagagattttgctgcataaatctatctatcgattcccagaactcactgtggcctgccgctcagacacatccagtagtcgttctccttgagaatggacccgtcctcgttgttggtggcgcgcggtgtattcgcccctcgcgggttcttctccgctcgccagagccacttggacggcatcagctcgtccagcacgtcctcgtcgtctccagcttcgtgctcgttgtacgacgtgaccagcagcggcacgcgcacctcttgcagcacgaggcggatagccggcagccactcgtcgtagccccagatcccggcgttgaagcacaccacgaggtccggctcacagtacagcgccttatcctcgaagtaggcctcgaagccgccgacgaagtagctcatgtccacctggcacgtcttggcgtccacctcatcgctagagctgtacgtctgcgagtactgggtgaggtgcatccgacgggacaagttgggccccaccagcaccagcttgacggccgtcaggtgcgtctccgaggccacgaactgcgcgaaaccccggaagacctcgaacgtctgcggtccagtgttgccctcgcggtggtcggcgcccagcaggtggatcgtgatcgagtctttggagcggaaggtgacgtcgcactcgtggtcacgttgcagccgccgcagccactccacgagcgtcgcagcgcgagtctctcgggccgaggtgcacagcgccatggccgactgtaggtagtgtacagtattgacggtctcttttggtggtgtaccggttgatgcgcctggcgggccgtcaaccagctggttgatgtggcaaacttcagaaaatcagttcgcgacgtacgcacgatagacctctacggcacactctaatgagctgctcacttccaattcgacgtctgaacggacggatactgatagatagagcggtgatgctggcggccgagacgacgtggatggacacgggcagctacccgcaccggtacctgtatgtggcgttcgccatcttccagtgcttcctgggcgctgggatcatcttcggctggtaagatagctaccggtagttattaggcagaggcgacgcttgcgttgctcgagatctggttacgacggacacgttcctgactgacgtgtgcaattgtaatggattaggacgtcgctggtgccgatgctggagaaggagaggatatacaacgagctctgcaagaccggagagacgagtacgcgctgtggtctcttcttctatgcgtgataagagagggagatctgactaagctgcgatgttttggcttagtctgctcggcgcagagtgaccgcctccagtatgcgttcacgatggcggtctccagcagcatgtggtccaatctactgctcggcctcgttttcgacaagtacgctctgccaaaaggttttacaattgagaggcgatgctgatcgtgcatgctccactgtggcgatctccgtgcaatggcagatttggaccccgcattacaaagtcgctgtcgctggtgctgctgattactggcgcgttactcatgggcaacgcacattataggtgcgtcgtttgcgacgaatgaatcgagatacgaatggcagtcaagctaatactttgatgttgttgtacgctctgtagagaaaacgctgaaggacacgacttgctgctcttcggaatggttttcgttgggttctccggtcccggcatccagctagctggcatccacatgtccaacctgttccccgaggcgacggcgttggttgcttgcttcatcgtcggcgggctccagctgagcttcctcatcttcacgctgttcgacctcgcgtacacgaagctgggcatgtcgatggcgacgatcttcgagatctacgctgctgtgctgttcctgtcgcttatcggcactgttttgacggagcctgacacgccgttcgaggctgttccgagtgaagagcacgagctgctgtcgccgatgcgcctgccctccgtgttcaaggaggaggaggcgtctctgctcatgtccacgcccgagctggagaagtaccgcagacggcatcgcttgccgacggacgaggtgttcttcgatggagacctccacaaccgctccttccggacgcaggtgctgtccaagccgttcctgttgatcgtcttctacttctcgatcctgtcgctgtggtgcaacttcttcctgggcagcatcacggggctattgcgttggaagggtctacccgagagtgaggtggcgagtctgcttggaaagctggcggtcgtgctgccgagtagcgtcgtcttcatcccgttcgtcgggtacctgctcgaaaagtgcggctacacgtactcgtcgctgctgtgcacggtggtggcactgtgcttcacggccatgctgagcaactcgtcttccggctggatcgtggcgggtttcgtgacctacgcgttcttccgcaccatcatgttcccgctgctgttcgcgtatttggggcaccgcttcggcttccagcactacggggcgctgtcgggcatcgccttctgcatcggcggcgttgtggggctactgcagacacccatcgcagccatcggtgacttccagaccatcggctatgtgcaggtgcgtgacgttctttcggtgttgtagaacttgaggtgacctgctaactctttgtattgttttgttctccagttcggctcgctgctgcttacgctcgttgcaccctactttgagcggcaacgggacgggtactactagtgcgagtgtgaccaggtcattatcaacggctgcgtcaatgaagcgtatttggtaaatatgctactgcagcatgaagttgtgattcaatgtggtgtgcattttgcattttaaacacttgtgcgggtgccgcaagccaacgacattcgcgcgtgtggagattaacgcggtgggtgggtgggtgggtgggggggtgatgctaattccggtctcactactcatgcctgtggttgaaccaggacttcgcggtcttggcggtggagcttttggcgtgcatgttgccgcttatagtcagcagtttcatggcgctgcgccgacggtcgttttcgtgtgtgcacgagaaggctggcaaggctgagctctaattcgagatgaagttgcgacgaggttttcggcactttggcgtttgtagttgccgccgccccgaagaattcgtcttggtcaatcacggaagacactgcactgccgaacagcgaggagctttgccttaccgcagtgtggtcaagttgctgcgagcggtaccggtacaggaatcgtgccatctcccgaggtgtttccagtccaagcaaccagcaggattgcccggttacctaggacggacgcacaccaaccacaacgcgagcggcgggtgggtactcggcaaaggtggcgctacgacatcgcaaaaagaagcacgaggacgagccgtcggtagtggcagtgaccgatagagaggagcaaatagcgggccagggcacgcgcgcgggaccgcagatgccggcactttcggcgagcagccagcgcggaatccccgtcaagcagatcgcttcgtccactggcggggcctcggacagcaatgaaggggctacgggacccaaacgcgcgctccgtcacgcgatgacattatcgcacttcccgtccagccgcagcttgaacaaagtggcccccgaagacgtggtgccacccccgccattgacacggaaggagaaggtgctggcgtttgtcgagaacaagtacgtgagctccttcatgacggcctgtaccatcttcacgctctttggagacgacttccgcgtgagcttcttcccgaaaagtgccgacacgcacgtgtacaacctcctgttcgcgctcttcatcttcttcaccattgagctcgtgctcaacgtgtacagccgacccaactacttcaaccacgggcggggattctccttctacatggacttgatctcaacgctttcggtgatccccgatgtcgattggatctgggttcaagtcgtgggctcctccagctcgagtagctcgtcacaggctgctgcactgaaagctggtcgagcatcgcgtgcgggtaccaaagctggtcgaatagtgcgtctcgtgcggttgttccgagtgctgcgcatcctgcgcgtggtcaagaagaacaagaacggagaatccaagaaggtgcagatctccgagccgtcgaagatcggcaaggtgttgaccgagaagaccacacggaggctgatcgtactagtgcttcttattattatcgtatcaccaattatcgacggcactgtggatccgacacaggatgattttcagacttcgcagttcgagcgactgcatcgctactctcaggactacaacacgtctggaacgatctcgatggcgcacatgcagagtcttgtgagcgaatatgtgcgcgattcgaacgggttgctagtccagatggagctcacaggcgtggataatactctgctgaagtcgtggctaacggagctcaagtttcagtcgcttaatagtgacgagagcgactggcagttcggctcaaaccaaaccttgacaaccaacccgaaaacaggctggtccgcctcgtatctcacggacgacccgagctccaagtaccgcacgacggagatcgctactgtggacaacttggggtgctttctcaacgacatgtgcgtcgactgtgactcgtccaccggcacgagcgattgccactcgttcgtgacgtacgacatttcgtcctacacgaagaacacggcgaatttgaacatcggcaagacgatcatcgtcatgttttgctttgccgtgtccatcttcgtgctcaccaaggacgccgagtcgatggttatcggacctatcgagcgcatgatgcggctggttacgcagctagctcaaaacccgctcgggtccaccgaggccaagcgcgaggagtacgaggaagacgcgccgaccggcacggattacgagaccaagatgctggaggacacgctgagcaaaatcggtcgcctgctgcaagttggtttcggtgctgctggtacggagattatcgccaaaaacatgggaggagctggcgacctggacgtgatgattccgggtaagaagatcacgtccgtcttcgggttcggcatcatcgagcacttcaccgagacgtgcagcattctggaggaggatgtcatcacgtacatcaacacgatcgccgaaattgtgcacggcgacgccaaagtgttccacggcgcggcgaataaaaacattggctcggcgttcctgctcgcgtggaagatttgcgatggaacgctgccaggtatgcgcgaccctcgtgaccctgctgacaaacctcggatgttacccgctgagaaggcgagaaagcgcgaagggatttacgtcaaaagcacgggatcgggtactgcagttcgacgcatcggacccacggagctcgtggacagcgcgctcactgctgtgttgaagatgcgcgtggacattcacaacgccaaccaccacggcacgctgcacaagtactgcaacaacacgaagctcatcgctgcgttcgacaacttcgaggtacatatgggcttcggattacatatcggctgggccattgaaggcgccatcggctcgagattcaagatcgacgcctcgtacttgtccccgaacgtcaacatggctgcacgactcgaagccgccacggggcagttcgatgtccccatgttgatctccgagtggttcgtcgacgagttatcagcagaagcccgtcgattctgccgcaagatcgaccgcgtcgctgtcaaaggtagcgagatccccatggacttgtggacgttcgacatcggacgatacccaacggagggtgtaccaccggaaatcagcgccgacgggaggcaaaagcctgtcgagttcggcttcgacccaatctaccccgcgcttcaggagggcattccctcgaccttcttctccaacttccacgagggcatcggcgcctacttcgccggcaagtgggacgtagcacgagccaaacttacagcagcaaaccagatctgggaggacggccccaccaaggttgtgctcaaggtcatggagacggaaggacggacagaagagggcgagttcgcagcgcccacgtggtggaaagggtaccggcagctcacggaaaagtaatagcacgtcgtcaaacagcgcaggcaataaatataaacttgtatttcgcatcaacttgctcagcgctacatgcacttcactcaatagaccgcgctggcgctaactaccatggacaacacaccccataggggatgcgtcctattaaccgggcccagcactgacacgaatgcaagtttcaagctgatattcctctgatggtgtagcacgctctgtagagaaatcgctgaaggccacgcacgacttgttgctacggtgcaccctgtttgtcgaggcaacggcgttggtcggttgcttcatttcagtgaccaccggcttagtttcctgatcaccttcgagacggactcaatacctgtcgttcagtgctgcaatgacagcagttccgagtgaagagcttgggctgctgtcgctcggagaaggatgcatgcccacgcctgagctttaattgccatgctgaatcgtggcgggttcgtagcctacgccttcttccgcgctgttggacatcgccttctgcattggcgttcgtggggctactgcaggcaacaactgcagacgctgatcgcagccatcggcgccttccagaccatcggctatgtgcaagttcgtgacgtggttcgcttctgattctggtcggcttttggcggtgtcggccttgacttgaccagccacagtaactcttgcattttggcagtccgacagctgcagtacatgtacaccgccctacatgtatccatggtacatgtacttcgaccggcaccggggctggttcaactggtgcaaccgaccgacttagcagcaccgcgcgcctctccaagattctcgacaggcgccacgcgggccgttactcacgctcctggtaaccaccaggcagcgcgcattctggtcaagcttctcggggaggtatgaagctggagttggcgccacgccatgccatgccatgccatgccatgctgctgatctcgcaggcgaagttgccttgcgccttggaatcacgccatgggcgttttctcatgggctcgtcaagttgcagtgctgcgagtgaacttgtcgcgggtcccgtctcgttacaaatcgacgaaatgctcccatctcagtaaaacggagtctcatcctaggtaagaagtgatgtgcaggatattttggcttcagctgggtatggactctatagcatacagtatttttgtattctccattatgcccgttattaggcggttctgctcgcccaattcgcgtgccaacgctttgaaactgattcacagatggcaggaagaaaaacgcgggatgtatacctgtcctagacgatactggttcaatgatctctttccggggtccaccagctttcacggaaacaaaatgcatcaaaccacttccacacgttgaagttacagcgccacgcgatatccttacaaacgggctctctcagcagctgtatcgctgctcgcggtagtaaagtgtacccccctggtggtacaaatctcagcaggaaggaagcgctgctctgcctcccccatggtattagccatttcgctccaccggccgtgacgacccgctctctcgaccgtccagcagcagtagcaacagctccacgatgtcgctcttctcgctcccgaacgtgctacggcgcagcgtgccgtccgacggcagcgacaacgcgccggcggtgcgcccctcggtcgtgtcgaccaaccacctgaacgcgcagctcgtggaggaggccaagcacgtggaccagcacctgttcttcgggccgcagcagaccgtgttcgagggcgagcgccagcgcgtgatccacggcgagcgcaagatccagaagaacagcaagcgcttctggctcatgtcggagccgctcagcatggagcgcgacagcaccacgtcgctcatcggcttccccacggagccgcaggcgcgcgcgggcggcttgggcagcaaagtgtcggccgccacgcgcttcctggggcagaaggtggcgcagatgaagttcccgccctcgcacgtgaacgaggactcgttctgcgacggctgcggcatggaccccatcgtgggcaacatgtactcgtgctccaagtgcgtcaactacagcctgtgcgagagctgctaccagctgggcatccacggcttcgaggactccaagctgctgctcgaagtgcgcgaggactttgcgctgcgcaaggtcatggacgtgtccaagaacaaggtgcccgaggaggtcttcacggtgctgctcaagacggtgtgccgcggccaggtggacaagttcaacttcctggccaagtggatcacggccgtcgtgctcggccagcccatcaacacgctcgaggtgcgcggcatcgagatcccgcacctcgacgccgagacgcgcggcacgctcgtgcagctgctgacccccgtgctggctgaccgcacggacctcgaggtgtgcatggagtggttctgcccggtacgtcctgagttttcttattgtattattcttgaactgttcgcggaattggaggactgatttttattgtgctgtgtattatctaagcaggacgcagacaacatggacctgcccggtgtgcagcgtcggatggagaccatccgcatttgggtggccacggacaaggaccagaagtcgcccttcgccacgaaggaggctctcaaggatgaggacaccgagtcggacatgtccccgacgagcgccaacggagacgtcattggctctcctggcccggcgagccccgtgtcagagtcgccgtgtgtgacgcccccgccgtctccctctggaattcgccgcaaatccacgggagcgacgtcaatgacttccgagtcttcttcgcagctctctcccccgcgtcttgatgcgctgacgctcgccgacaaggtcgtcgagtactcgtacgaggacgacgacgaagcgtacatgtcggactcggtcaagagcgatatcgagccccggaaagttgccagtttgtcgccctcctccggtcagcgatcggaaggcatccagatgtaagaagaacgaggggaaggccgagagaccgactggcggacacacgacgcagccgtgaatgagctggtgatcgcagcggatcgtagaggtgctgcgcgtccagtccgcgggcttcttggtcttccttcattttgttattttcattttcgctttgcactcggaatgtaaaaagggttgctcattgcctatataaaagatctgtccgcaagcactgttccgttctaccgatagcaaaggcgaagatggctccattatccgttcgttcacttcgtgaaaataaaagtctcccatctcaatgctgttacacgtcgctgcactaaaaacctttagcgcggtgtatctgtttgaccccacgcggtgctatcgtgaccatcctagttcttggcacggtagaaagcaaggtacgccatgtgccagtcacctccgcccttgagcttcatgatgtcctctgtcttgcacggcgacacatcgtcgtcgtcgtagcagtaccagtcgtctatgatcatcacgcccacacaaacacgttagctgagtcactgcgaatatccatcagcagcaattgtagcagccgacctccttcgtggcgcacccaagccatgtagtgaccagagtcggcagaacgacccttgtgcgtcaaaatcgcgtacagctcgtagtttccctgagaacaggcacaccatggtcagcaaacccaacaataccacttgaacaaaacctacaagatcgcaacacgtacttggaaatcgacggggagctcaatgccgggggatttcgctcccagcgagagcgcgcgagcagtctcaagggcagccttctcttcctcggacaagccgtccatcgggtcatcctcatccgcttccttcttctcctcagcatcgccctccttcttctcaccagcaggcttctgttacacggaaacaaatattgccacgtgagttctcgtttgagcatttcacgcagtgacaattaatctaacgtcacgtacgtccttaaactcgtttagaatcttctcagcatttctgtcacgcgagatcttcatggttgccttcagctcgtcggagcagaagtcgtacacatccagggtcatggggaagctaatgggctgcaaagttgaacaagcacagcattttctatcagcgattgctcacatcgtggcacagacccattgtattgcagcttacccgcagcatcttgcacttgacgccggtgtggtcgcggctctcgggcgtcgccttccagtagaagcgcatgaactgcacgcacaggtacttgggcaggcggtttatccgcatcgtcttcttccacacggcgttggctcccttcacctccgagtgcttctcaatcgtgccctccagtcccttcaataacaacaacaacaacagttattagcttaagccaacacttcatcccctccaccttaatacacttacaatcttgatgccttcggacaggtggttggtgtcaatggtgatgttgcacacgagcttgagcgccttctcctttttgacgatcacgggctccatgtcgctctccgtgcactcgagcttctcatccatctcgagtccgaacagcgcgtccaccacgttggacgtgggtccgagcgacttgagtccgcccgcgggctgcgtcagcgtctgctgcagcgtcgagaagagcgtcgagaggaactcctcactgtcctgctgcatgtacccgccgctgcgcggcgactgctgcgcgaactgcgggtacgcgcggcgcagcacggtcacgaacatggcgggggtgatgctgtccacgctgccgtccagctggccgtacatgtccttgagcgccgtggtgaagttgttggccaggtcggccgagacgcctcccgcctgcgccttcagcgcctcgcgcagctccttcacggggcgcaggcactgcagcgtggcgttcatgtagcacgtgttgcccaggttcacgaggccggcggggtacactgtgcccgtggcggcgatgtccttggtggtcatgtcctcgatgaagacgatgggctccttgggcttctgcacgacctcggccgagcccatgagcatgacgcccgtgccgtccacgagcttgtcgagcgtggcgaggtccacgtcgtccttgagcatgcccttccaggccttggacatgagcttctggcgctccacgggcacgttcgtgagcgcgtagagctgcgccttgaacacggccacgggcgccgccttgtccaccgccacgtccgggaacacctgcttgccccacttgacgctcaccttggccgtcatgcttggtacggtactccctatagtctcggcgtcgaggtctctctcgatcgatagtgggggcctttgtcttcggcggcttgaaggcatgagagatcgcaggttcgagaaggcagttcgacaggtgccacgcgattggatgaaatcatgattaggtaatcgcgctacacgttgaagtgcactgcaactttggttcatgtattttgcacgacggcgcctccatttattaaaaacttctcgcagtacgaggctgcgaggacacttaatcttttgacttactttcttcttccacttcttccacttggcggggtgcgtgcttagcccgacgaccggaacttggacgtggtcagagtgaccgtgtcgcgcaggatggcgtcgcctgtcggccgatcctcgaaccactgcatgctcgcgtgcgtgcggttcgccacgttcagcagcgagaaaccgtagtcagcctggcggaacgctgaccactccggctgcgggtcgaagtaggtcggcgccaggccttcgcggttgccggcgtcgcccagcacgacgtacaccgggccgtcttccacgaccttctccttgtagactgggtggctgcgctcgtaggcgtggacgtggcctgcaaccacgacatccaccttattctcgtagaggatgtcctccatgtgcttcttcatgatcatgtgcggctccatgccctggtgcgccgtgttgctgttgtaccacggcccgtgcatgatcacaaccagccacggggtggcactgcggtcgacgcgcttgaactcttgcttcagccactcgtactgcagtgaatcgggcgtcgactcgacgtacggggtcagaatgatgaagtgcacaaggcccacgcggaagccgtagtacaggttgcgacgctggagtttgttctcgcgctcgtagggcatgcggaagcgcgtctggtacgcaacgaacttgctgacttcaggttggcaggggcgctccacttcatggttgcccgacgaaatcatccacggcatccgggcgatcagcggctcaaccagcttgccccaccgatcccagcggtactgctcgctgtcggcgtacgagagatctccagcgcacacgatcatactcatcttggacttgacagcatcgaggtggcggatagtctgctctgaatactctgtttggctgcaaaggaggaaacaaacgtcagaagaacagcattcgactacaatccgtcactgcagcggtgcctacccgaggtctccaatgacgccaaaagtctgcggtgcctcactgccgacgggaatggcagtcttgaacgagtacactgcactccagccgcccgcgtcgtcaccgcattggtctgcatatgaacaaaagcaatcgtcaatccttgatctgaaaacccaagactccccgacatcacactactcacagtaatacgtcgtgtctggggtcagcttgtcgccagggatcgtcacgtggtggagccacggggacgtgtatttgcagaagtcgtactgctcgcacggctcctcggcctgctgcacagtcgacacgctgtcctcggacagtccgtagcgcaccgaggacgtcgccgtcttcacgtccgtggcccaggagatggtcatgcccagtcggatctccgccgctgtagtggttgacgtccggatggccgagtagctcttcactgcgacttcaccgccgaacgcaacgtggatctgggacggcgacgcagaccccgcggtgggggccacgagcatctccgacatgctggtgatcgactcgtcgtacacagggacgcgcgccgtgttgaccacgttggccagcacgaagacggaggcgaacagcagcacggacgcgcctgcgatcgccatcttgttgcgcacggagcgtgccggtggtgtcgccgctggcttcgcttcaaggagtggggcgtcggagcttctccggctcgtgtcggtggcgcgtgtgtgggctgagttcgcgcgcgggcgaatcgtcgagccgtatgaggctaacgacaccggatcaggcaccaccaactgaagtggcttcatgcttgttgcttgtcaatgagatggaataatgctgaatgatctagaccgtgtgtgggcatgagcctcaagacagattcactgcgctccaatggcatgaatcttcgtcctctcatgagcgcagcaacaaacaccagctggaatcgtcctccatgggggcaagggcaattatctgcatctgtgacgtgtgcagggatcagaattgttatgttgcgattcgcaacttagcctcacattatgttgctgattagcacactccatccaccaatgggattatgatgtaggttcattctgtagcttgcacccttgaaaaaaatggctgttcatccgcacttgcgcactcgcggatcagggagaccccagacgctctcaatggacgtcgacggcgcggccccgcccgcagatgcggcgccctctgcagcgtctccagacccttctccacctcccgccacctccgaagcagccgcagctccaaccgcgccgcccccagcccaggaaggcgccgagaagctcagcaatggagcccccagctctaatggcacccttccagcaaccgtagaggacgcggacaaggccccagcgccgctcaagccgaagccgaagcccaagatccgcgctccgcccaggagactgcgcagtggcagcgggagcggcagcaacacgagctccagcggcgtccgacgtgagtctggagcccctcgccccgccagcgccaacatgggcatcgtcgtgggcaccctcagacgcaggaacagggtgacgctgcgcaccagctcgctgtctgatgaagaggctgatgacgtggtcactgcgccgccccgcagtacagcggggctggccccgagacgcaccaagaagcagccgagtctgcgcaacatggcgtcgctcgtgcgctcgcatctgcgcagctccaggagtctggcatcgctcagcagtggagcaggtggcagtgctggagacgctgacgccgacgcagacaagaggccgacgctggatcgcagcaactcgtcgttcgcgggcgtcgctcagcaagtggtgacgtcgaggcgcgcggccaggggattcctgtccatgtggacgaaggactcgaccgagaccatgtacatctaccgcggtatccacatggagaagaagaagctggacctggtgagcgtcgcgtccgagtacaaggagatcaagcgccggcagttctaccaggaactcgtcgtgtactttgtgttcctcttggtgctgttttcgctgctgtcctggctgccggtggaggagagtttccatcagaatgatgtggtgggagcgctcacttgtcgggaggagggcaagtgtgagatcaagaccttcgcagacatctacgagttcgctggcaagctgcgagaaacggtgtgcgaccgagaagacgttactgcccaatgggttcgcgtgggcggagtggggttccgtcaagtgcgcgtgaaggagcagcggtgccgggtttatgacggatgggaggcgccgtgctacccgtactatagccctgaggtcgagcagaagacccctttgattggtgaaaacgacactggacgcgtgtacgagtggagggatggcctgggcgagctgtcgccagagatttatcgatccgtggtggaatggttgttcttcgctcccatcaagtcctacggctcaggaggctacgccgtggatctgtgcgatttggaggatgtgagcgagctccagcgtgacaactatctctccgagcacactcgtgctgcggctttcaagtttatcctgctgaacccgatcacccgcgtgttcaccattggaatgcacgtcttcaaagtggatccgtcgggccatctggatcatttcgctcacagttcgcacgtccgtgtgatcggccatgagaagcctgagcagtttgcgatcggtgaagaggacgacaacaaggcagttcccccggagcccagactgcacagcagggtttttagtgccgttggggactcgttgtcgttggtgcgcgaggcctttgatgtgcgtgtactgctgtgggttgcgctggtcctgttcttcatcacatactgcatcggtgaagcgactgagatgagtactatgggcgtggccacgtaccttggatcggacatgtggaacctgttcgagctcacccacttggttgtactggcggcgatattgagctacatggtgcacttctacgtggtgtccagcagcttcggtctgcacttggcggagttgcgcgagggacgtggtgtggaggagctcagccacactagctctcaggagttactgacgggtttccagcagctatcggaccttgcctcactcgcgtctgctatcagcttgctcaaggtgttcaagttcttgcgcatgaacgcgaccctgaacctgctgtggcgagtgctgggtatggctatgagcgatctcatgggtttcctggttatcttcaaccttattttcctggggtactcggccatgggcagctatgccttcgggttcgctcttgaggagtactcgaccattagcaagtcgtacggcacgtgcttccagatgctcgccggagagatggactatgcgcgtctgcggcaggcaaacccgcgcgtcgctccgctgtttatcggcacgtttgtggtgctggttttccagattctggtcaatatgttcgttgcgattttgtccgagtactacgaagtcgcgaagaatgacgagacagccagcggtgatgacgtcgagtacgatgtcctggcgcgcattcgcagtttcgtaagcgcatgttcaccgacagtcgttgtgcccaaggaccacggtgttatccgtctcattccgtggcagcaagtgcggcttatctctacgaacctcgtagaccaggaggagactcgacagcgtgtacggaagctgttccgtggtgctgtgtggcgagttgtcgccctgttgcgatttggcatgaagtttgaccggcgtatcaactttggcgaccgcaagactcacgacggcagttcagcgcacagcggtaatggtggaggttccaacaatggcaaggaaggccgggagctggtgtcacacatccggttgtctgagaactttgaccacaagactatcaaggagatgatccccatcggtatcacaatccgcttgcagggcgactcgatccttggcgacggtctcgcgcttaaggttgttcaccacagcaagttgtcagtggagtgtgttgttcttggccccaatgaagctgagagcgctgctgctggagcaaatgcccccggaaagtcgccgaacgcttttgctccacctcgcacgatttcatcgttgggctcgttcggagaagactcggacctggatgacggtacacctcgagaacgcgtgctggagctgatgggcggtgagaagctgcggatcccaagaaggcgacttgcggtacacttgtgccgcaccatgctacaggagctcaagatgggcctactgcgtgcgacgaagctgtggaactactcgaaggaccacatggtggatgactatcacctcggcctgctctttgatagcgttcgcgcggatggacgcacgagcctgcgctttgacgagatctcgcgtatgctggacctcttcctgcgcaaggacaagcggaaggcaatgtgctcacaagcggaagtgcgtcgtgaagctcttcaagtgatgtaccgcttccgcaagtgtctgattgacatgccttcgcgtgagaaggagggccacaactaccgtccgaagccagtggacacgtccaaggtggagctgggtcatcttgaacaccttggtgatgtgctggcgcgcaactgtcacgacatgtgggctctcgagcgtctcaagcaaggatggcagtatggcaaggagcgggatgacaagaagaagctgcacccgaacctggtgccttataagcttctctccgtggaagagcaggccttcgactaccgctcgtctattgagaccatcaaaacgatcgtctttatgaactatacgatcacgcgtgcgaaccaccagcgctcacacagcggctcgttccatgatcccgtctcgcggtcagcctcgatgatgtccgacatcgctgatggcattggcggaagcaacagttcgctcatcagtggcagctccgagtccactagcccccgcgccaacgacgccgccgtcttcgaagagttgggtactgcctcacaccctggagcacccgcgaagcctgtgccatcgctgctgcgcgaagcgatgagcttccgtcgcaacagtctcatgggcgattccccgtacttcacgacgtatggcgagggtaacgtcgaggtgtaccggcctctgcctatcgacacaacgacagtagagctgcctccgagactactgcggcttgtggatctgctggccgaaaacgcccacgaagtctgggcaaagggacgcatggacgagggttggacctatggaccgctgcgtgatgacagctctaagaagcacccgtgccttgtgccctatgtgttcctcacggacgacgagaaggagtatgacatcaatatcgctaaagagacgctgaagaccctgatcgcgatgaagttcacgatcctcgaccgctcgagcaagtactaagctcaactcgagttctatatcgacgctggcgcaggtagctcgaactcgtgcatgcctcgcagccggcttggtgcatggagatccatgtagacaatataaaaagttggtatttcacccgatcgcgctgcagtttaacgagccgttgaggcgggggtcaatccatgtgtgcttatcggggcagaaggatcacaagggtttgtgagcaacaagtgccgtacaaggtaagtcattgcgtgtcgtggtgccatcctaatatgacggatgcatttgtgtgggtttagatcaagtatgcaaggtggttactcctcatcgggagcgtccaagaggatgtcggtggcagcttcaatcgtgaggcagagtctcacaagctcccgacgcacagtcatggcgttgccacgcttgagttcgttggtgacgcccgggaacaggcccacgcggtagtcatcccactcggaaatgccgtacagaacctgcaagacgagagcacggtaagttagaaaacagatcgtggagtattcgagcccagaagcatgaaagacttacgttcttgacccaagggatgtacgtgaggcccgacggcagcaggaaagcacgctgagcgcgaagcaggcggttgttgacttccctgactcggctgaagtcgagctcttcgttggagatgacgttcatctcgtggctgacgctgatggcagcagcttcgaatgcggtggtggcgttgtgcaggcgagcaagtgacaccgtctcggccaggccctcgcgagcaagagcgtcttccaggaatgcttcaccacgacgaagttcgcgtgacagctcggtgaagtcgtactgcagaaactgcgcgtcggtgaaggacagaaggatacttccgtacagctctgcagcggcacggtggaacgcgaactgaggatcagcaaagtgcgagatccacgcgggaatatcggcactggtctgtcctacgccgaagtatcctccgtcaaagccaagctcaagagacgggatgcccagtcgacccatgaatggtggaatacgtccgccaagatagcggtccatgggtgggagctccaactcgacgccgccggggttcttcttgttggcgtcgtcgagccagtacgcgaacacggagttgccgctgccctccgggagctcgtcatttgtgaaggtcgcgttgatcggcagcatgtcgaggtcgtcctcatctctgctggagcttccggcggctacagcgttagtgctcgatgcgttggtgaagaagaagctgtcaacgtcagggaagttttgcttcttcggctgggcgacggcagccgtcatgaggtagatgttcttgcggatcgtagccgacgccttgcaacgaagcgcaccggcaccacgcaccacatcgtccaagtgcagatacacaacaccgcgtccagcgtttccactgccgaagccagggtatcggtcgatccagtgcgagctaccgaccgagccgaattgttcgccgccaaacgaagcgagaaccagcgagcggtgcggcgtccatccattctgcagtagtgttcccagcgctcgtacgacctccagaaagacggcgttgccagatcctgggctgacagcaccagcgttgagagagtcacgaggggcaccaacaagcacatggcgatccggttcgcgagatccatgcagcgtgatcatgacattccacgtcgtggtgagcgagtacacgttacggttggtcattctgatgacggtccccattgctgccgaggacgagctgtcattctccacgacaagcgagtactgaacgcccagagcgccaccctcccaacgcgacccgaagacgtccgcggctttcacagtcttgatgcctgacaccttgttagcagcggcttccatcttggtgagcaagtcttgagctacagcggcgctgatcggcatgctgacaatgggcgggagaatgttgaaggtgttgttgacggagtagacgtcctcaaccgagatgcggtcggcgttggtgcccatggggcgagtagcagagaacccttcgggcatggtcggatcaccgtcccccatgtagacgctgccgaaggttgtcgtggtgcttggacgccacggaccatcgggcgctatggggcctcgagcagagccgtcgtcggcaggatcactgttcaagagagaacacgatgtcagagacagcagaggaccaaggccaagtcaagtaacgtacgtgtaagtgagcacgccgactgcaccgaacttggaggccaagacgactttggcaggaagagagacgtcgccgcccatgcgaaccagcacgatcttgccagccacagaaacgttgttctgtgccagagcttggtagtcctcggaggagccgaagtgcgcgtacacgacacctcctgtcgcggtgccgttcttggagtacaagtggaaggccgcgtgcggtttgttgatgttcttgcccttcgcctggcgtttggcctgacgagcagcgtgctcggcgatgaagtcgtacgaggccagcgacttgttgttcgacttcttgaggatctcgaccgtgagcgtctccggcgcgttgacgaacatttcaaactcgtcaagcttgaccgaatcctcttcaaagccgaagtcgatggcacttgagcggatgaactgcgccatctcatagtcgccgctgctaccggtgtgtcgggtgacctgcccgtgtgagaggagatgtggagttagtcatcatgaatgaacaccataccgaacccgggcgattgagaacgtacgtcggtgtagaactcgaggttcttcaggaatccgtcggctgaagttgcagcgatgaagtgatgttggatagccggcgttgagctgcacaatgaatgaaacgatgaagcggtgagtatcttgcttgcaacggttcatgccgcgtggacttacccgtagttctcttcgtgtcctaggacgcccaagagcatgacgcagatggcgctggcgaggataagtcccatcacaaaggtgattccgacgcgcttacggagcaggatctcctgctcgctgatgccatcgctcaattggacttcgcgcgggctgtcggcgtagatattggccctggttagcggcaccttggactcgtcggcgttgctgtcgccttcgtcgagatcgaggtcgggcagcaccttgagtgcatcgcccttgatgatgctagccctgtcgtccgaagagcccattgcgacctcaaggctcgcagttgccgctggagttgagtcctgagcgctgctagctggtttcggcaatgcgagctcctcccaacatcgcagagcatgccgcacactccgccagtgctatcctgggcgctgcacgccgctcgctatttttgctggcgctgtgtatgctgagtggagctatcataagctggctgtgggatgcaagtgcatcgagcaagaatagcgtagcggtggccatcatcacgccactccgcgctattcctgcactggtagtgagtgaccaccaccgcaacgttgtgacttgggctcacggtgagccactgtgtgggccacgtgcagggctctgcagagcctgctgtcctgtagccagcggccaggtcgtatgcaagccaggctggtgcttcgctgtactcacgaggccagcggataccgatgcgccggatccgccggcacgaaggagctcctcgatgatgcgatgccgctggatatcctagccagggcgtcgaccggttcggcgactcctgcgacgctctcactcggcgtctgcaggacatgcttgcagcaactcccgcgcacttgatcttgtcgagtctccgttgcggcggtggcggcgctgcgagtgcagtggggcccggtgcaggaacgtttcgcggcgtgtcccggcgacccgcgggcggaagcggtagtgctagggccatagtggcagggccatatccagcggtgacgaaattgatgcactgcagcgtgcctccgcagccgagcgcagctcagtagcgccgtccttggggcgacgtccttgggtcgagcatgcttggaggcacaccgagttgaagctgcaaaaacttggtgtgacacacacattgaactacagacgtgcttctcgtttgaggcagggtggaccatatcaaaaagggtcttttatcaatcgtcacgggcctcttgtcagccaaaatcccaaagtatcctatcggatagccaaggcaattcgttcatgcgagtcttgaaacgactgtacatccgtgtggtgcgacaattcaacgctgctcgccttgtttatgacgccgaggtgcaacattcatcagacgattgagcaacgcagctcgacgccgcgcgctcgctggcagcgagtcgctgcaagagggagcgctgaggcagggaaggccgcgccacgcaggccaagagggtctgctagcaacgtcgagactctgcggcaaacgttggcggtgatgtatgtatcactatcatacactgtactgtaaattttcccggtgtcggctattctggctattctggcagaagttctgcttggtgcgaatcgagtcagtccactgtatctacgcttgaagtgcttttgaagcagtaagttcaaggacgctcgataactttttcttggggggttacaatggccacgcctacgtaggcgcggcacccgtacttgttgtccttctacctcttctgctttgtccacggacactcgctcgtgtccttgcggcgatctcttaattcttacactagttcacacacaggaaggcaccacgcccacagcttggtgcatcatgccttcgcgtctcacgcgctgtcttgcagcgctcgcggtttccttcctctctcctctcttgtttattgttttcttgtcatgtttcttccatcaaaacactcactcaactcaccgcgcccgagctcttgagctccgcggcgcaccgcttagctgaagcagctgatgcttcgcaccttcttcttggtctggccctcgaacatgctctcggcctggcgagcagattcggccacgatggcgtcgaagaaggccactccgtccttttcctccgacatgttcatgtcctcctccacgaccttggccgccttggcgacaaccagttccagctgcgagggcgacgtgaagtcaccgtcgcgctgtagcagactgccgatctcgaacagcgagaacccggcctccgctccacgcttgagcaccgccgtacacacacgcatcgtcgtcacacactcctcctcgatcccaacggcacgcagcacggccgcatctcgcgcctcgtccagcgacgcaatgtggtcgagctcagcacacgtaaacgggaattcagcctggggccactgcagccagtcgaacgtcgcaccgtcgagctgcttgtaggacggcaggcagaagccgtggtcgatcggcgtcatgccgaaggtctggtcgttcggccgcgcactcaacaagatgttgccggcgtggcggtccgtgttaaatagacgcacatccaggatgccgatcttgtgcacctcggggatcgcgaacttcagcgtgcccatgtcctccgccgagcactgcgaggccacgaagcgctgcatcgagccctccttctcctctccattcacactcaaaaccatcaagttcgtcacaggcacaccactaaagctgccgtaggcgttgtccagcaaataggcggcgcgttcacggagagctccgttgccgactcggaagcccttgttcaccgggtgctccgtcacgcccaccaccgcgttttccttcacgtaccccctcgggttcttcggggccatgtactcctcgtcgcgtggcttgaaaattcccagagggttcatcttcttggtagaagaattgtccatcgattccaccgacaaaaagtacgcaccgccgcagccctcgctcgtcatctggaacgagctgccggtgtccgcgaccatgcacttgacctgctcggcgaagcgctcggccgcctccgtcgtgagccacttggcgtccagtccagcaggcagctcggtctccggctcggcacattcacccttctctccgaacagaatgattgggcactcgctgtcgcgcttgaagggcgaggtgcagcgcagcggcgccaggcggaactgcacgagcttggtcaccaccgtctgctgcagcaggcccttggcgttcagcatggccgagccgtgcagccgcaggcggctgaagcggctcttgatcctcttgcgaccatcttgctcaggcgccagcgcgtcgtccgccctgtccgagctcccgcgaaaccattcaacagcgcccatgctttctctctgcgcttgggtttcttcttagctgcgttggagacgatgaaggtcggctgtgggacgcgggagggggctgaaggcgctgctcgcggtgggggtcactgcgcgcaaggccaagaagaaacggaagacagagagaggcaaaagagagaggctgggggtctctcttgtgcggcgcggagtctggggcggaaggctcaaaggaggcggagcttcaagcgcggtgggggcggaacagtgcttgcttgtctgctgcggttcaaattgcggaatggcaactctacaaaagcggggcggacgcaggaaatagccagctcgatccgtttagacaggtgcaggatcggctttgtccactcggatttaaagcttggaaggataaataagggagtttagttgattttgcaaaatttgtgtttataaatcagggcgccgcctgttcatcacccctaatcagggacaggaaggtgggctgccttgcattcaccagaatttactggaggttttgacaggctttgctccttgcacttcgccgcagatcaagcggagcgttgctaactgtaagcagttggcggcgttttcgcacgggggaggaatccgcgcatgagcgagaagagcgagggctatcacgacgccgtcgggtaatccgctccggtgacgaccagctgccgctccgttcgcatggcaaatatggcagaaagagcgcccgtgttctctcagatggcggcgagcctggcacagttctgagcgcgcctctgaggagtcctcaacgataataccgcgcccagagctgtcgtgccggcaaatgctgagctctccgattcaaggcattcccgggtaaattgcaacgcaaatgagaccaaaacgcagcttgccccttctgccgagaagaagtcggtttcggctccgaacgactcttgggatggtgtccagcgatgaagctgctggagcagctaacgatgatacatcaccgccaacgtttgccgcagagtctcgacgttgctagcagaccctcttggcctgcgtggcgcggccttccctgcctcagcgctccctcttgcagcgactcgctgccagcgagcgcgcggcgtcgagctgcgttgctcaatcgtctgatgaatgttgcacctcggcgtcataaacaaggcgagcagcgttgaattgtcgcaccacacggatgtacagtcgtttcaagactcgcatgaacgaattgccttggctatccgataggatactttgggattttggctgacaagaggcccgtgacgattgataaaagaccctttttgatatggtccaccctgcctcaaacgagaagcacgtctgtagttcaatgtgtgtgtcacaccaagtttttgcagcttcaactcggtgtgcctccaagcagcgctgcatgctcgacccaaggacgtcgccccaaggacggcgctactgagctgcgctccggctgcggaggcacgctgcagtgcatcaatttcgtcaccgctggatatggccctgccactatggccctagcactaccgcttccgcccgcgggtcgccgggacacgccgcgaaacgttcctgcaccgggccccactgcactcgcagcgccgccaccgccgcaacggagactcgacaagatcaagtgcgcgggagttgctgcaagcatgtcctgcagacgccgagtgagagcgtcgcaggagtcgccgaaccggtcgacgccctggctaggatatccagcggcatcgcatcatcgaggagctccttcgtgccggcggatccggcgcatcggtatccgctggcctcgtgagtacagcgaagcaccagcctggcttgcatacgacctggccgctggctacagtacagcaggctctgcagagcctcgcacgtggcaacgcactgataccgctcgagctggcggtttaccggtgccgctgcctgtcacttccctgcaaggaggggtgggcgagcaagcggtcatgcaaccagcgctttttcttgcggggcaaggctttgctgcctgctgctgcgccgagcagcctgctcgatggcccagcgagcgtccacgatggcatcgagtcgatgcatgctcgacctgcgggccagcagcgaggcccgggcagcaggctaggccgagcccgcgctggacgcttggccctgatatcttgcttgctgggggacatgcattgtcgatccggacgtacctgcaggcaaatcggtgtcgaaaattgtaacgggaaccccacccgcccggcccggggtaacgaacgcattgaggacgcccgccgctattcatgcaggggaagcaggccctcgcggcgtgcttggggaggcattgccagcgtagtgaccgagcctgttaaacggcgatcctcagccctcgctcgccaatactgtactacgtggcggcgcccgttggggagctcaactgcagctgctgctcgccagcgaggaacaaaagtggcaccgaggctggtccacaacccccggccctcgccgatcgtctcgcgccatcaaacccgctgctggccgcgcgccatgccgccggacgcgctcaaaatcagaggcgcctcggcctctgtgccgacgcccccgccaaatgccgcaggtcctcaaggcattattagactctgccggcctcccgcggagtcgcagcaaggcatcacttcgcgccacctgtcggatggatgattagcattgcgccgggctattataaatgggttcatcggcccacccgcgcatagccgcggcgggccgtggcatgaacgccggcgactggccgaaaagcgacgcctcccccctcgctgattcgcgcaaaatcgcgccaaacgcagcctacccacccgggctgacccgtattgacacaataccggtttagcatgatggagtggcctcgctgccttgccatcctccccgttggcgccattcctggtcttcccgtggcctgaacaagcctcgcggtgtgtattcctctctgtgttctctgtctgtatcatccccaccatgcctgtcaatgccgtcgtgtccgtgtccgccatgccgtacgagctgcccgtcgagtgcgcgaccgaggcgcacgagatcatccagtgggcgctgctcaaggagaagcactacccggcgctgcgcagccctcgctacctctcggaggtgcagcgccacggtatgacggccacctggcgtctgcgcgtgtgccgatggatgttcgagaccgccaaggagttcgagctgcagatggacacggtcttcggcgcgctgcacttcctggaccagtacctgagcgtgcactcggtggaccgcgtgacgctgcagctgctgggcatgatctgcatgtggacggccagcaagatgcacgagggtaagcccatcctgctcgaggagatggcgctcatgtgcgagcgcaagttctcgcgctcgcaaatggtcgacgccgaggcgcagctcgtgcgtctcatatgcttccgcttcaaccccccgaacgtcttcaccatggcgagggacttcgtcaacgagctccccttcgcaggcgacgacaaggacgttcgcgccaactgcgtcgcctccgtgttcaacctcctggagcgagtggtcgaggagatctcgtcgctcgagtgctccgcgtccagtctggccaaggccgctgtccaactcgtggccaagtccgagtacaacctcaccgtccccgagctgctcaaggcgctcaagaccgtccagatcgaggaacgcgcctaccgcgcagccttcaaaactgtgcgtggcgcgtacttcggcaccccaagcgtctccacccggacccagactacagcaactgtcacccctgacatggagcccctcaagtcgctcacgcagagccccacggccatcgaacaagtctcggacatccacgacgaggccccgtcgcccccctccaacaacccggacgactcatacctcatctgcaccgagacgctgtctccgtcaccatcccaggcgtcccctgcccccgtgcgaacgactgcttcgacttcatcaaccatcggtgttactcgctccgcgtcctcacccgcgcgctccgagaccgataccgagttccccaacaagcgtccccgcaaggtgaccatgtagacaaccacaataggaatcaacacacccacacaatgtagataggaaggcattaacggaagccaaacaaaaaaaactaatttatactctgaacaccaaactctcttgcttccgctcctaaatacttcttctcgccttcatgacgattcttctccacctaccatctatcctagtcactgatttctatgcatgtcacgctaccgtcgctgtcctctgcaccatcgtcacgctgaacatcgcgctgtgcagtgtcatctccgtcatcttcatctcgctgccgaataccttcttgttcttgctcctgctgcgtgaagaagagtctcctgagatctcccgtcgacaggcgagtctcgcgtagtctgctcttcttggcggttgaaaggacatctccatcccccaggaaggcggccgtgagctggcacttcttgttctgcaacgccacgactcgctcctcgatcgatcctttcacgatgaagcgaacgacgcgcacctccctcgtctggccgaaacggtgggcccgatccacagcctgccgctcaaggctgggattccagctaggctccatgatgaagacgtgcgccgctgctgtgaggttcaacccgaggccaccagtacgcaatgacagcagcaacacgtccagcggaggaccaaccactggtcccatgtcgtagctgtcttcctgctgctggaaattccgcacgatctgctctcggtccttggcaggcaatcgtccatccaacttggcgaaagcgatagcttcgttgccgacagctgaagcatcttccaacgacgataccgactcgcactgcgcattgtgagcttctaggcgctccgcaatcatatccaggaagctggtccactgggatatcaccagcactcgctcacgacgtgcacgcaccttcttcaactcgtgcatcagcgctgtcagcttcgtcgactccaacggaccgctcccgctcacagtatttccatcagcgtgatgctcctgtagccgcttcaagagctcggattctccagctgaaaacggagaaatgccgtctctcgcgttcccgaccagcgcttcggcacttgctgctctcgtcagcacttcagccaacgggtctgcggtcacaagggtacaggcatcacacacttgtcgaagtcgaaggatgagttcaaacacgtgcatgaacagtgggcgctccccgccatctttggttggagtggtgagaggaactcgacgacccccctgtcgcgcctccttggactgcaagtaccgaagcacttgccgcttggtcgaacgatgcaacagcatgtataaagctcgctccacatcagaagcaaagtccagctcgaccacctcttctgtcttcggagggagctctaggataggagcgttagaaactgcatccaccgtagacttgagccgacgcatcacaacacgaggtacgagagctccaagttcacgttcagaaagcgcatgggcacgatttccaagcccaacaaactgcagcaacgccgctaggtcagctgttcggttctgaataggagtgccagtcacacaccatcgacgcttgctgccaagggtgaaagcagcccgagctcgtgcgcatccagcatttgaaatgaggtggctttcatccagaatgactcggaaccacagcagctgatggagctttgacgtcaccacggacttcttcgaactcggagtcaaacgcggagcttgatgccacccatccgctgtacttgtgccctcatcatcgccctcagcaccaccatcgtcgctgtctttgtctcgaaccttgcactccaaaagccgaagagtgtcgtatgtcgagagcacgatgtctgctcccataaattgagtagcagagcggaagcttttccgcgtagcaccgtgatacgtcaccacgctcagattcgttttagctcggatctcttgttcccactgcgataaaatggagagcggcgtcacgataagagttggaggcgtaagacgcggcaccgtgctccccgtcgtacttcttgcttgtgcttcagcttctcgggcttgacgaagagactcgcaaataagtgcaagacagcatactgtcttaccgagccccatctcatccgccaaaactccaccacacacctttgcaaccagcgcgtcgactgctgtagcctcaccacgacgttgctgatcaatagtgactgggtcgccagggtcctgctctcgttcgagcatccactggagcgcctccttctggtaaggctgcaattctaccagcaactccggcacaacgtaagggaatacacccggtttggctgctagggactttcgtcgcctgtgacgtcggcgtctgtcgctggcaaaccggtattccatctccagtggcagcttcgtatgcaacagtgcacctcggtttgcgcgcttccgtgataacgccgatcttgatgttgtggaagctgttggcggagttcgaggtgcccgcctggtcgatgaaggcgccgggggcgtacgcgatgttttccttgcagaagaagctgtcggagaagcgaaagttgttcgtctcatggaagaagccgcaggagaagtatgcgcttgtttccttgccgaggaggctgtgggcgtagcatatgacattcttcttgctgacgacgcggtaggtgtggcgtatgaagttcggctaaccgacgaagccgtgggggatgcaaacgtcgatcgccttactgacggaggctgctccagaactcttgcgctttgcttgttggctgaagccagagtcgttactttagttggagttgcaggggcttcttgctgctgtgccacatcacgatcgtcttcttgggtcggttgtccgaccgcttggctggattcgggggcagttggctgtacaacctcgtccatctccacgtcttgctgctcgtgaacttggctataagctggatagtcatttccatcgccgaactcgtagtcaggctccgaggaccaaggctgtctctcagctgcatcttcgggaggaagcgattgatgagccgatttatctccactgccgacatcagcaggagcgctcgctctttcttcttcgaccatattctcaacgccagcttcttccttcttttcttccttgccgtcgtctttttcatcctcgctgtcactgctgaacaccagttccttggacacattcatatcctcggcatcatcgtggcaatccaccaggtccacaaccaccctatgctcttcagcagccttctctccgcacggctcattctgcacaggctcttcctccattatcacctctccttccttcggagctgcggccttctcttcatcctcgcgcacctccgacacatccaacatttgggtatcttcctcctccgcttcctcctcctccattctcgcccgctcatcgtcactcagatgtatcgactgcatcgacacatccaggtcttcagctctaaagctcggctccagcgaccgacgcggcgttcgtcgcttctttccgcccggtcttggagaccattgacccggcgtccacggcgacttggccgccccggacggcggcgagatcgtccctacacactccacggaggcgcgtctattgtctgcaatgggggacacgtcagccatcagcgcttgcaagcgttgcgaggcactcactcggcgctcggaggtcggctgggacccgaaatcctgcgagctgaaggctgggaacatgctctggctctcaggcggcggtggggtgctgtagacataggatccgttcgatatgagcgagtcttggggctccgagaggggctgtgacgccggaataggcgcctgccatcgactgtggttcggaggcacgtgcttgatgcccgccgccgccagcactgcgcgcaactggcgctcgtcctcctgcgtcacggacggcgcgcactgcaccgcgaacttaccgaagcagtcgaccagcacacgctgcgtgtagtcgcgccagtcgcgctcgtactcgcgctgccatcgccccgaggccgccatgggcgccgctgcgtatttcaaatttgaattcaaaaaggaaagtgccttttcagccaatcacatgaaaggaccaaagttgacaagagcaggacgatggacggacgcgtccttcgttgcaggcaggagatggacaaggatggacagatcggcagattaatcgaaggcgtttcagcttgaagagcaagtgtacaatgtaaagtggtggaagttgggatttattagatacttcgttgcgatcgcttcaccactgctacaaaaacaaaaggagaaaagtgaagagcaggagctcgcagtggagctggcgcttcttcttccttcctcctcataatatcgccagcgaggtcgctcgctcctgaggtttccgatgagtcatggctgggtgggaggtgctggcgacgaaccttactactggtactgtgggactatgaaaacagacaagctctcggcgtctggcatcgaacgcggaggctaggaatggtggacggggatcacgcgttatcgccgccgcactgcgaaccgctggaacaagctgccagtcgattgagtccgtttggggacttcattcgcccccggcaaagaagaagacttctgcaacttggtcgtgaaggggaagcccagtctcggcttctgcacactgcgctcctcggccgcttgaagcagagactggcagtcgtggaaacgcaggttctccgggctaagcacgttgtacaccgtgtcgtcatcgtccttgtcggcgttctgctggttcgaggcgttcggatacggctcagggtgcgggccaaacaagctggccgcggcaacactggcgaagtaacccgacttggactgcgccatcgtcgcgaggtggagtccgtacccagccagcgaagacgtagacgacaccgttgagtagttgagtgaagtcaccgagttgctgtgcttcaacaagtccgacttcagccccttggacaacggccccgagtgaccaatctggttgttgccgtcatactcatcgtcgccagtagacccgaagttggtgaccgacgggcacacagcaagagaatcaatggagccaatcacggatacgcgatcgtcggcgtccgccctgttcttcgagcgcaacgactgctgcagttggttgacttggtcatccaacagcgagtccagcgcagaagagttctcatggtcgttgccagattcgagatccgcagtcgttaaaacgtcaccaaagtagcggttgttgtcgccctgttcgaaaggcggaggtgacgaagttttccggatggattctccttcagtgctcgtgtccgacatgcactcctcgtccacgccgcgccaacgttgccgccgtgacttgcccacatcatagctgaacccatactctccaccgctcgtcatttcatcggcagttggcgagtgcgcctcagactgttcaccaaagatagagttgaggtcggagttatagtcgtgcagagtgggctccgatgactcgccaatcagattctcggtgtactgcgtgagcttgtcaagctgcgatcgcagcatcgtcgagcggttgatctgctgctggaggcggatctccagcattgcattctttacctccatccgctcgctcttttggcacacagcttcgtacttcgtctgcaactgtgtgtacgcctgctcaatctcccggtacttcttctccagaggggactccacagggaccatcggttcggaaagagacgcctcgcctaatctaggagcgctgttagcgtgcacaagtccggcggacgtcagcgcctcgatccactgagcatttgtcgccaccatcttctccagcacattcttcatctcatgggtttccttctccaggaactccaggtggtgatcgaacaccgtctgggtttggttgttgttgttgtgattggtctggttgctcacagaacgagctggcgacggcgcgcgcatagagcgcgacgacggcgaagacaccgccgggcgctggaacgacgcaaacatgggcgcttcctgctgctgcagctggagctgcagttgctgctgagaaagccgcttcttcgtaaggccgaccgatgagcggacgtcgcccgccgactggaacggcttccgcgtggctaatctcctcgagggctggcgccgcgggggctcaagagcccgcgagggcgtggggcccatggagaccgacaggtcttcgcgctcgggtgacgcctcgggggattccggcgacaggtcggtgatggtgaagcggcctttgacctgcgtcttgcccttgcgcacggacgagctggaggacgataggtcttcgttgttgctgccgttgttgttgttgttgttgttgttgttattgtcgttgttgttggactgatgctgcggctcggaggcgtcggacacggcgccgctgggcgtcagcacgtccagctcctcgtcgggcacatcagtgaccacgaacttccgcggcgtgcggagcttgcgccccgtgatcttaggcaccgagcggcggcgctgcgcgtccaggcgcaggtcgcgctccgtgttggtgcgcaccagcagcggctcggacggcgcctggcgtgagctggccgccgagacggtgctggaggtcgtcatggagagtaactgcgccgcggtcggcggggtcgcgcgcgcggcggaggcggtatatgtttcctaggtcgcggcggccagacaaggctctaaaggaggcgcacgccgcagctcgttacttacgcctcggcgcgaaggtctcctgtctaatactaagccagcctgcaggcccatacaacgcggggagaggagacggcctggatagcgcgtattttcggccaatgacagctcgcgggtttacgacgaaaataccgacccatacccggcaacgttttatgcacgactatacagctggtgagattaacgtgcttctggccgggcctggtgatatttcggcgtaactgggcgaaaccgcgaatttgcgggaaaatagaaaagtatccggacagctaacttttcactgcgttccggtggagtgctctcggcgagtggacacacctgcatcacatgttgcccccgcagcacccgggacccgcggtattattaccgctaagtttgtgacagggcaaggggcgaacgccctcggaagccagcaggctagtcttctcaatttcgctgaaaatgctcagcggcaccacctcagttatccaccacttacatgcgagtgtgtgtgcaattgcctgctggcattttcgcacaaccaaccggtctggaaaaacgtccaccacctgacttcgcgggctgggcatgaatctggtgcatgacgccgggaagagccacaaagtccacgcagcatggcgaagtggtgcagctggtcgcaacctgctggcgctgggctgtgatgatcccatgctgcgtggacttgcattcatcgcttgcggcgcttggttacatacgcgcttggtttcatgccatgaactcaaatcgccgaatctcgtttcagcgcggcaaatttcatgtcttcctcaacgatttgaactgacgagccaggataatttccggcaccaaaccgggaagtttggtgccaacgacgactgggcagcaacggcgccgatattgaccggggatcagacgtcccagtcagatatgtggcgtacttcgcgttctccgagcttgggaaggtaagttcatggctaccattcctatcgttgctgctgcagtctaattcgagtggaggtattttatccagagggaaaatccgctagctctccgtggatattttgttcccgacaacattggtgctcattactaagtacagtaccatgatgcaagagtctccggcagcaatgtatctatcgcgtctgtatacggtgctaccgcattaacatgttgttttggctgatgggcgagcaaggatcggatcggtgcacactatcgctagtttggaccaagccacaatggttctagccatgcaaaagtcagcaagcacaagcaaactgcaaacaagaaactgcagtcatagttgagtactaacgagcctcaaaaatggaaatcaatacatgtagggggggtcgaacctggcaaaaaacgtgctgatttttagggcgatttgatgttgattatttcggcgaaatcttgttgattttcaaaatcaaccacctccggaggtggttgatatcatgatgatttcgaacttcaagtggtaccgcttgctgttccctcctcgacctctgatacaatttcagctgtttttgaagtccctcctcaactagaaattgttgtgtatgtgtttaggcaagttttcacacgaatcctctccaaataaacatgttcactatcactataaacaagttttagatgttaactcgcgatgatggagacgttgtgagctgctggacagtgtttcgttggagtcggccattgctaggtataaagctgaatataacaagatgtatatgcactaagcaagagcctgcgcgtgctggcgaaaaaggaagtgatacttcgctgttttcaccaactacatgcgaaaactgagagtgagtaccctactttgatttgttgatttttggggcagaacgttgctgattattcggccccgtctctgatgatatttttgtcgccatttttaaggttcgactccccctaatagcttcatgtagtcttgtcgaagctctcttcaaaaagctcgtgtggtcttgttgccacctccgtcccagaaagtgctgtttcctactctaagtacgattccagaagcgcaaccttcgtacgacctttgcacaacatcaggctggaaggacaatgaatggctcgcagaaaccattggttttgggcgaagtggcgctctacaatcctcaggccagagcagttcaagtttttcccagaagcagggcatacccaagaagcatccgaagcgcagagcgccttttagcagtctgtgtgtatcgtatcctaccagtccaactggacttctggcgagatctctctttcacagtggagatcccagggtcaagcaactcgccccgatgcagagcgcgcgcgtctcctgctgccgcaaggtggcgggggtcgtgcgcaggctcggcacctttgtgagggacaagcgaagcaaacagttgaatagcgaagtctcggttgttgagcatctggaccgcctggtgacctcggtcacctcgctggaaaacttgctccaactgatcgatggctccatattcccaatcttttatgctagtctctttgacgataatgctggagaccaaccatggagcagacatccttgtcaaaccaattcatatgcatgcacattaaagccgtaggcaacatggtcagcttaaatagagcaatcgtactaggaataggagaaatggcattatgaagttgatgctgccacgagaagcacctggcaatccacttgattactggggtttattgttagatcactaaggtgctcgctgcttaccctcaattcttgctcctaaagtttcgttgcgattgcaagtcgttcattaaagtttcttccggaggcctgcatttgttgtttacaagaaccttctgcgtcgacgccatggggctctgtgcggcacggggtatgaccgcggaggaccgtgagcaggagaaggtcgctgagttcgtgcggtatgccatcacttccgatctcgtgaagctgcaagagatgattgtcaaaaagaaaatgaatccaaacgcgaaagacgtacgttgtattggaaagaataggtccgattgaggccttgctaaggtcgtgtcctccttactcaacgcagcgcttcggtatgaatgcagtgcactggggtacgcaaacctttgtcattcagcctcagcctcttggtgagagatggctaaagcttgagtcttcgatctgtcaatagcgtcctatgttggagagctcgagtgcatccaagaactcatcatggcgggaggtttggcaagcgcgacagactccaatgggcgcaatgcgctgcatcacgcttgccgaaaggatcacgacgaggtggtgcgctacttggtaaccacggccaaggtggacatcaactctcgaagcgagaaccaggacacgccactgcacaaagcaggtttggttttcaggctttgttgactgttcatgtggtcgcacttgttgccaacatatatacttctgctgcagttcgaggcaagagcatcaaagttctggaggtgctgctgaagcttggcgctgatgctaatctccgaaacgagcagaacaggacgcctctcgaggaacttgaagcgaccatgtcaacgccttcggtacgtcagcatggaaattgcctttggctgccgccgtgaaactcattcagacttatcccaaacgtagaacgcgagcacgggatcgaatcgtgtgacgtctgcagggctgtcaacccacactgaaatttacacggagcccgtatacgccgagcctaggaaactcgacttcatcggactcgcattgcagtcacgacgtgaaagctgtcctgttgagcgcacagacgtccggagttttcgatctcgccgcagcgtcaccgattattcaacagggagaagaggttcaactgacgaatccggccagtgggcaacgacagcattgccaaagccagcagcaccgtacgtgccgcctccaatgtcgacgaaagagcacgctccgctgcagaagaaccttcgatacgctggcaaacgcgtgatcatggcgatccgagtaaagagcgcaatgcccgacaccgaaaagcttcaactcatgcagctgatgctgaaaaagcacacgacacccaccgactccaagcattgaagtagtatcaaacaagtagcaaatatcttctccatcttccgtaacctgcacaaaattccccaacaaacagttccaacgcagtatcaaacaagccatgagagggtttcgcctttgtgaagccgacagtcagtcgaggagatttattgaattaaatactcccgtctcgctttccttcgcagttagctagcaaccgcttagttggcagcctcgcgacggtagccgtcctggccaccgcgacggaactccgggttgaagtcgcccgacgggccgacacccttctccttgtcgaagcggccacggccgaagccaccggcggacggggcctgcgggcgcgtggggcgggcggcctgcttcttgagcgtggccggcacgatctcagcgggcaggtgcaggtacgagcgcaggtactcgatgccctcgttcgtgaggtaccagtagaagtactgccagttgaaggtctccttgacgtagccgcgcgacttgagcgactgcatgagcttgatgacctggaggttgggcacctcgacggcctcgtgcttgggcagcgagaagtccttcttggcgaccatcacgccctccttgaagaggtacgagtacacagcgatacggttcgtcttggggaccaacatggtgacagagtctagaaagcttgccggcgagtgcggatcttcacgggaaataagcggcgaggtttgcaggaaaaccagaatactcggccctcatggaggcaaggcaccccagccagccaaccaatgcgccgctccccacgttacacaatattgtgtgcaaaatgtaaaaaaggccggaaaagcgtaattacgccttggccttgttgggcaaaacacggtgtaaaatgcccggcgatcgccgatgtggctgccatggggtacgtcacacaccaattagcggttgatttgccgcacacacaccgagtgccgatggccgagaacgcggagaagtactcggtactcattgacttaacggccggcacggtcggcggcattgccggcgtcgttgtgggacagccttttgacacggtgtggtcatattatgatggtttaaactgtggagtgagctgggtgattgacgtcgcgtggcatccgtcctgcaggtcaaagtgcggctgcagacgtacagcaagtactacaatggcgctctcgactgcacccgtcagactgtgcgtggatgttaatgttgcaaatgtggtggaggctggggcagagagagattgtgaatggcgctgatacgaatgttgtggattgactgcagtggaagcatgaaggctttcagggtttcttcaggggcatgacgtccccgttgatcggcagcgctgcaacgaacgccgttatgttcgcagtgtacgagcgcacgctcaagatgatcgacgacaacccgcagaacccgacgctcaagtcggtcttctacgccggcgcagtcggaggcttctggcaaacggttccgctggcccctgcagagctcatcaagtgcagacttcaggtgcaggacggacgcaggagcagtcaataccgaggaccgatggactgcatccggcacattttcaaggtcagaggcacgcctgggcttttcctcggattcacgtgcacgctgtggcgtgaggtgccgtccttcgctgtctacttttggctgtacgaatacaccaagcgcaagatgatcgacggcggcatctcgcctactccgtccatgttgactgccggcggagttgcaggtgttgcttcctgggttgtgtcttatccttttgacggtgcgttcatatgttttctctgctgttccgcgggtaaggatagtacggcgtgtactgacgatgtgctgctgctcgttgcgtgaaccagtgatcaagtctgccatccagacgctccctgtgaaccacaaattgggcgagcacaagatcgcgtaccaggctcggcagctctaccggctcggtggctggcgaatcttcttcagcggcctgggcactgcttgtgtgcgagcgttcccctgcaatgccgtcaccttctacggctacgagaagtcctccgagatgctcaagaacatgctggaggactgagtgtcgacgccggtgcgaaagtagccctagaaccacgtactatagccaatagatacgccttcaacatcagcaaccaatcccatgtcggctacgtggtgcacaccacacgtccacgtcaacttcacgtcggaatcctactttgaagcagagtaaccactcataagctgatcctctgtgtatcatcgccatgctcgccctccgctccgctctcctccgtcctcgctcagcgtttcctgctgctgctgtgctgcgtcgccactttgcggccaagggcaaccgcgagcacatcgtggactggatggcggggccttcgcaggcgttggacgtggcgtccaccaagttcgacacgctgtcgctgggtttcgccgacgatgacgcagcctcgggggtgctgcacttgaagctcaatcgcccgaaggtggtgaacgccatgaacatgcagatgtgggtagagctggcccaagttttcgagctggtggagaaggatccaagtgtcaaggccgtcgtggtgtccggagaaggccgcggcttcacgagtgggatggatctggacgtcttcgcccagatgcagaaggtggcgatggccgagtcctgcgaggggcgcaagcgcgagagtctcatgcgcgttatcgacaagttccagcaagtcatttcggctccggagaagtgtcgggtgccggtcatcgcggcggtgcatggtccttgtattggagctggcgtggacttcatcacggcctgcgacttgtgctactccgatgtgagcgctctgttttccgtgaaagaggtggatctggccattatcgctgatgtgggcaccttgcaacgactgccgaagcttgtgggggagcgtcaagcgaaggaactcgccttcacgggacggaacatcggcggactggaagcggagaagctggggcttgtgttgaaggctttacctgatcaggagacgctgatggcccacgtgggcgatgtggctaagactattgccaagaagagtcccctcaccattcgcggaatcaagcaaacgattcattaccagcgagaccactcgacgacggactcgctgcagcaaattcgctatcacaacgctgctgtactgtacagtgacgacctggtgcaggctgttggtgcagttatgagcaagactgagcccaagttccgtgatgactagtcgaaggtgagcttgtcgctcaacgataacacatgagcgcctctgatctttcccttttttgtattttctgttgttttcctcttcttgactcctcactagctacaggcaatttggtgctgaattcaaccacactgccagcggtctgcttttactccactttctatctcgagtggctcgatagcgctctagtccttcttccttgcagcgatagcagccaagaaatcaccgcgtccacccccaggcattccaccgcctcgaccacggccttgaatagcagccatcaagtcgccgccacgaccaccaccatcgccgcctcctcctccgccgccgccgcgagccttgatcgcagaaaacagatcaccgcgacctgggccacctgggttgccacgaccacggccgcgaattgacgcgaggaaatcggttggtggtccaggggggccatcgtcgtcaccaccgcggcctccacgtcccttgatcgctgcaaagagaccgtcacgacctcctccacgaccacgcccccgaccacgggcagccatcatcggatgaggcgcccggccagggccaggagcctcctcagcggcttcactttctgctggtggagctgcagcactgttcttctccttagcctccttcatgatttcagttctagtcttcacccggcggttcaccggtggacacttctccagcgacgccagcgtggtgcgactcttttcgcccagatccttcaagaggccgcgaataacagggatagccgagcgcagacgcttgtcacttgccttcacctcgtccatgcgctcgtccatgccatcgaagcagtccgccaccgcatcgcagtagagcaggattagattacactcgatcgttgaacgcgtatccttcgcatccagcgctgcgtttcgcttaccggataggttcatacccgaccgctccgcgaacttcaagctcgctaaacggatttcattcaccaactcgccaaactccgccaactccaccttaattgtcgcggcagtctccgtacgctcaagccgacgcttcagtctggcttggaaccacagtagctgtctgttttcgatctggtccaacgacgtgtcaatcagttcacatgcaccgttggcttcggcaacaagtcgcacattgcggtagtgcttcttcaacgcgtctgcacgagagttggcgagcttcgctcgggccagttcctgggcttcagccaaagcccgggcaccagcatcgtcggggttacccttttgcaccgtggattccatgtacacgtcaccatcggggtatccgagatcctggtcatatgcaggattcttgttggctttgatgggacactgcttgccgatcatcgggcaaccaatatccgggtcgtcgcgcgtagcgtacgggtggttatcttccggtccgtactgcttcacgtgcttgttgtatgagttcacaacagtcttgaacgtctccttgagtgttttaaaccattcgtacttcttcttcgtcatttcttcaccttgttgagttttccacgtctccgcaatttcgcgcagatgcatgtgtaatgcacgacgctcggtcaccgtgagaccagtaacgcggaggttctccagcagcgaagggtgattcttcgcaatatcagcaggattcatacggatcagttccagcacgttcgttcgcttgaacttacgcgcaacatcacgcggaagagtcttgcccgttggtgacttcatagtctggaggtcggcttccgacatcttcttcacgtcaaccggcatcatccgacgaatcgccttaagagccttcacgttttcatcgtagttctcgtcttcccattcgcgctcctttcgcgcttcttcagcagcgtactcatcagtcagcataagagcagtgttgtacttctccatatcctgttccaggcggtagtattcttcacgtagctgcttctggattgctgggtctgggtgcgtgacatcagcagaaccgatttcttgcatacgcttggaaatctcctgtaccttagccatagcttcttcgtacggaatatcagccgcaacagcgataccagcctgctgcagttgtttctcaagtttgagcaaacggcgaagcagcttgacttggtcactagagatatccaggttagcaagcatgtcagccgctctcggctcatcctttggccgactggatcggctgcgtttcagcttctccacttctgcctgcagcgcacggatcttttcgtcgtacgagttgataccatcgaagaacgcctgaatgccattctcgtcgatgccatcttcctgcattttcttcttgacttcatcgttggagtggccatcctggaccatgcgccggtacacagcgtaaattgagggtccctgaacatcggactcctgaatacgccggtttgcttcaatcaacttttgagcttcttcctgggcccgtcgggcttccgcaagctgcttttcggcttcctcctttgctcgggcagcttctgccatggccttctccacggctgccttaccttcccgctgctcttcacgagctgcagccatagctgcttctgccttctggcgagattgctcaagcagcatgtgtgcttcttcctgtgcgcgagcagcgtggtgcgtggcttcgtcggctgccatctgagcctcagccttgatcttaaccatctcatcacgctcgttcatcataccattgctgttaagatcatcgccaagacgaccacgctcctgatcctcctcaaaggccttctgcttgttcacgtactcgagcgacaaggtgagcacagctcctgccgaacggctaccaagtgccagagggtacttcttcgtagtcttttgcatgttcggcagcgacttcagaggaatcgaaagcgttgcgataagctctgtagcacggaacaagtgctcgtcgaagatacgaatctccacaaccatgtcatcactcggggcctcgaacgatgccgaattgtcctgcttccacacaggcgaacgctggttcttcaccaccgaagtcttgaaggtctctgcaccaacagtaacttcacaaagtgcgttcaccgaactgcccgacttggtcaagttcgttgcggacagaacgccaacgtgcaccacaggggttgagaacgcttcgtagttgaactgcgaaagacgtccaccagcgttgcggtcgaggaatgttccatccatcgaaatactttcggtacgctgtgtgcgcagcgccttggcctcccgcaatgactcgccaaggttctgtgtacggttcacggtcttcgaggcatcaatggccagcttaattgcatccatccagcccttcttgtctgattcagacgtacaggccatcaccatacgtcgatcatccacacggagctccaagacatactctgctgtcacgtttggcgacctgcagaccacatcgcctgttgcaggcagtgagcgaaccgtgcatcgatgattcaaaaagctcatttcgccccgcgacgtcgtagaactcggactcttgaagtactccaccttggacacactaagcacgaagtatcgcgacttccagttgcgcatcacacgtccctgtttgtacatgcggcccttcttgatggtagcagcttggttgtccagaatcagttgtgcgatcgactggttgtcatccgcctcattgccatcatccttaacgatgcgcgggttactcatcagtttttgcttgacgtgcgaggtggactcgcgcagtcggaatgactccgagtgacgagagttcacacgctgcacatcagcgagcttgtccttgggcacgaattgcaaagttttgggggccgtcgcgttacgaagcacgttcatgacctccaggtacggcatacacagcacatccgtttcgttcaccttatacacaatatcgccgatcgagatcatgccgctggtcttggcctgacccttcagcgcacgcacaactgcgccgtcaataccgtagcgcactgcttcctccaggttcaaacccatggggccattgtcgaacaccacagcgtacgtcgtaagctccgtgtccagatcgttgtccttgttctgctggaacttggcgcgcacaacttcctggcgccgggcctcgtcgatctcgaacgagatagcgaggggcctcggcatcttacggatgaggtcgatggcgtcggagaaacccatgccgtccacattctgcccgccgatggccacgatgaggtctcccgcctgcaccttgttctccagcagcgggttgttgatgttgtcgatggccaggccgtggtcgatcacgccgtccttggggggcatgagcttcacaccgagcttctccttggccggcagttcgatgaccacgacctcggggccgtcttcgccgccgccgctggtggtgccgccgtcatcctcgcctccgtcgccattctcttcagcgggggccgactcggccgccgcctgctgctgctgctcctcctcctcggggcgctccgagccgcaggccacgcaggcctcctggccgtcctcgttggccgtgaactcgcaggccgtgcacgtccacgccatgatgttggagcttgggagaagagttaaccttcctaccaagtagctacctagctacagcatgggacggcgcagagttcgttggttagatacacgagtgccgcgcaaccctacataggggtttgtctacttttgtgggggcagctgtctagtctaggggatcgatatcactagacagagatctatatatgcctactgggggaggagaaaagaaggaaggcgcgcactaacctacggaggcgctcgtccgtccgccggggatcgcgaccgcgtcgactctggagactcgcgcactggcgccgcctgctgctcgtcgccgcgcgttccacgaggactgcgcgtcctcgagctgcttctctggtctggcgccgaccgccgcgccgcgttttccctttgtcgcgatcgacgatttggaaaggagggggtgaacgaaggagtgatggtccatcacctatgtgaggggtagggctgatttcaatagtaaaacgaagacacttgtggatctagcctgacacgatccagccaaaggtgagcctgtgctctggcttgcctttgagttggtcgccgcagtatatgtgccagggtacaagtgtatgcacttagagtatttgtgctgcgtgccagtggagtggtgatgcgggcgctggctgccatgctggattgacgccggagcgcgacaaatacgtggaaggaggcagttcgccgagccgcaggcggggcgatgcacggtaggtaacgggcatcttccgctctctctgtcgaatcgggtggtgctgtacccgccacgccgcgtttttggtccggccctagtgtgtaccggtgtcgcgatgatgcaacgactcgtgattgaagtgcctcgggctccgagcgtctcgacatcgtgttacgtgggcaatgacaattgcttgtcggcgtttgcgtccgtcaggccacgtacatgtgcaaggggtttttcaatggcactccttgatactaatgtactgtagaagtgtagtggttttattgtattgcatgtgtctgcagtgaatcggtgagaaaaagatagccttcaagcacgcaagcctgctgccgacagctctggttgtggtccgttgaatcgacaatgcgaaacgatctcggatgcattgcacaatcgttcgtgtcgacacctcaattcgtgccacgctcggtcctgctttcgtgattccaattctcattcagtgtgtcgagttgtcttgcatccagacaaacttgaagctgaaatcggcacctaaagatatggtaacccacgtcactacacgatttcaagcatgatgccgacacggactgacttaccgaggtgcactagcggcatctgcgtcacgtagataaatatgccgatgggcttcgtctggacgctgttcgcttgtgtttcgagcacaaacccaagttgctccaggggattgaaacccaacgcgcgcttcatcacaatgatcgaaaacacaaatgatacgaattcgagcgagctataggctagcaccgtaagcgtggaactcgacagctcggaaatcgacagttctgtcaacgttgggtagtaaacgctgttgggtaaatgaaagaggaccacgcggtacaaacctattgaaatcgcaccacacaaaatactggttaataagccagactactgaaggggatctccaaacacccatacttcgtacgatagagaattggcaccacgacttcggcgtactccatcagcacgacgtactccgtgatgaataggacgtgtctggccttgcgaatgaaaaagtctcgctctgcacgggaaaagagcttttcaatatcgcaaatatcatcgagattgattggatttgttgggttacatgagtttggctgagcagcaatttgcggaaatgcactcatcggcttgacttgggtgctttgaaatagccctctcttcggatagctccagtgtaagcatgcgtcgaatttcctgccttgaccggtatacgcgtcgggtatttcttttgggcggccacttccatcttcgatggagttacagtgctcgtcgaaaccgtaagaaccccaatactacatggtgtgttctgaggtttgatccatatttgcgtgtttcatgtgctgcgaggattcgcaatgacacccgataaagttttcgtgcgcgagggggtggtcttgggggattttgtccattatttttttcatgccctcgaaaacctctgcaatgtcaaccatcgacgcccagaaactcacgacgtccaatgccatgactgtgacggtcgatgtccaagatgagctgctttgaagagcacttgagatatacagcgcgttaaaaatctcgattgtgaagatgatcgtttcgggtttaatgtcatcacggccacgtagtgttctgttcatccagtttctggtgatgagcttgaccattggcaatacagcaacgaacaacacttggccagtacccgtgagcgacacgaatccatagatatacagcgggtagaccataggcagcgacatttggcagtgaagtgttgccaacacttgcttggcatcaacccacaacgacggatctgctcgccattgaggacgcaaaattctttgaagacacaacgcttccacacaagtcagaggcagcgcggccacgagcactgcaaatggaaaagggaaggcgactaaatgacacaaccataccatcatggcaatcgcaacagcggctgcgaacatttccacgaagacaatctgatacactgacagtttgaggggggcactccttgtttaatcagcatgggtgtgcttccccctataaccgcagctaccacccaagagcgcacgaagaacacccagttcgccttcacaccggcgtcaaccggttccagtggtggcatgtctttcagcaaactcaacacgatacaaggcaacggcgcgaccagtaagacgacaaccaaccgccgactgcttgttttgctggagtagctgtgtagctgctggagacgctcgacggagtagctgccttgcagttcgacttgcagcgacatccacgccgccttcagtcgctgaaacgcgcgcagcagccacttcgtcatcgctttctccttgcaattgacccgatggaccaagatagctagctgcacactagctggctgcctgcaagaatgccacttcaacatgtccgtaacctgtgtgcaccacatcactaacccttttcccatcataaatagtgaactgccccatcaaaccgcatcccgcgccctccattgctttttgggaagccaggcagtaagtaggctccgccccctctcgatccgctcgccatggcctccaacgacgtggacttccgggcgctgtaccagagctcgctcaagctgacgacatcactcggggagctgggcatccctcggctggagaagcgcctggagcagctggacgacgcgtcgcgcgcgcaggccccggccggcagccgcaagcgcccggccgccgcgggcgccgacaaggccaacttcctgctggcagccaagggcatcgacgccgagaagctcagcaaggagctgcagcagttcgagatcgcgcccgagttcgagcccgagacgccgctgggcgagacggacctcgaagggtatctggcccaccaccacgagatgatcgtgctcacggccatcgaggacgtcaaccgccgcacggtggaggccacccacgaccgcatgaatcgcgccatgatcgacgacttcgaggacgccaagcagcggctgctggaggacctgggcggcgccaagacgctcggcatccgcaactacccgcgcgtgctggagcaggacgaggctgcgggcagcatcttcgcctctgcagctcgtgagaagcgccaggcgctggagccggcgtcgggtctgggtctcagcggcgcgggcttcgcgggccagccgcgcttccagtccacgaccagctccatgacgccgtccctgcatatgtcgcagctgcacgtggagaacgccatgacggaggagatgaagcagtactactcgaccatcaaggagctcaacagcagcagggtgcccaacacgcgcagccagttcgaactcgcgcgccacttccagcgcgtgtgctcttcgaacgtgtccgtctcggtcacgggatccaaatgggaggccgtgctcaagtgctggcagctggtgaacggcatgctggccggtggagaccctacccatcccaacgcctccaagctggcggagcgggagttcgctgccgtgagggagggaagcgacgaggcgcagcgcacgctgctccagcaccgcttcgccttcggcgcgcgcgtgtttctcgagaaccagttccgggcctttgtgcaggaaacggtgcagaagaacaacctcgctactggcggcattccggacctggtgtcgacgattcgcgcgttcgtgaagcacctgcacagctcgcgctacactgctaacggcagtggcagcggcacggacgtcgacaacatttgggcgattatctactactgcctccgttgcggtggcgaccaggaagctgtcaacctcgccaccagcctgtcgggcgcggactcccccattgacgctgacgttgtgtgtgcgctaagataccgtgcgcaccagaagagcctctacgcggatcgcaatgccaacccgttgaacgcgttctcgaagcagttccctgctgagtttgaccgtttagtggaccgttaccaccgcttggtcagctcctcgatcgacgctgtccctgtcgtgaacccgttcgagcgctgcgtggtgaacctcctgtgcttcggcaatgtgaatgcgagcgagtcgcgtgtcctgactactgtggaagactacctgtggcagcgcctttgcttcatccagcgcgtggccgcgacaagctcgggcccggacagcacgtacacaattacaaagctctcccagagtatccagaggtttggaccggcgcacttcgaaggcggagcccagccgggtggaggcaacttcacatcattcttgtacttcgaaattctactgatcacgcaggagttcgagaaggcgattaaatacctggcatccaagggtttcctgctcgaggcggtgcacttcgcgatcacattgaaccacttcggccttctggaatgcacatcgttctcgatgggagaggaggatgagacgacgatcgacctggtgcgccttgttcgccagtacatccacggcttccagcgcgccaacgccgcggaggcggccgactacgtggcttgcatctcggacttggcagcgaagaaagagctgcttgcggagctactgctcgacacgcgcaagttcgacgtgctggctggattcacaaacaacacagacggctcgcgtacgcgcggcctgtacgaccacctgctgaaggacgagcctgaagatgaggtcaaggagctgattctctcggctgcacgcaaggccgaggctcgtggtcgcccgcacgatgcgtttgcgttgctgaagagcgctggtgatatcgagggtgttattgtgctgctcaactcgcagctcagctcgaccctgtccgctactcggccagagcgcgaggagtggttccgtgaggccaaggagttcgccgagaaatggatgcgattcccgtgggtgcagacaatcgcgaaccggcatgcgcgcaccgctgcaattgccttccagacgctgctgaacatcagcatcttcctcgagatctacgagaagcagcagtacgaggacgccatcgcgtttgtcgatgagctggaggttgtgcctacgcagaactctagcaacctggcgctctgcgtggaccgcttcctcgccttcgacgagagtgtgcgtcagaacttccacatcctgctgctcggatacatggagtgccttgtgcgcgatgccgaccgcccgaagacgcaagcttcgggtgaattgcggcgtgctggcgtcgctgccctgcgcgaaaaggccgagctcctcgtcacatttgccggcatgatcaagttccgtctaccgtcgggtaccaacgagcggctgaaccgcatggaggccatgatctattagaatgccagttgttagtgccgctcagaggaaaagatcggatgtagatcgacaaggacttcaacgtacaggaacaatgaacgcactcgcgattgcaaattgtactcgtagtattactcttcttcggggctacaactacactgtcagtctctctcatctcgctgatctgcacgctacttctacgatcaaatgaaatcttgcatgctgtgtcttgacgctttgacctgcccacggcaggtacgaaacatgggataaattaccgcagcggcgcctgccgctgtgagaacagacgcgtcgcgttggacgagaactggaacttgctcggtgacgccctcgagtagaacctgttgggtccactgggctgcgtcacgtggtctgctcgcgtggtgacaaaagccagcgacttgcgcgctgggatggcctgagcaccgaacgtcgagcctgctgctgagctagagtagttgatgcctctcgctgccgcgggctcaccgagtctcggcttcctcagcacaagctccttctcagcgctgctttctcctgcacgtcctctcttgatcgccgccttgcggggcgtgcggatacgcgaaggtcgtgccagctgactcagcgtagcagtggaaggtgcaggcagcgagctggtgaaggacgtcgaggtcgcgttgaagctgaagtagctggtgggggcccctgtcgtctgctgttggtgttggtgttgctgctgtgctggcagtgtcgaagctgcagcggcgtcgcttgagccgaagcgccgggtcttgggcacggggtggcccaccggccgagccaggtcgaactccgtgttgatgagctcgtcgcagctgccgaactcctggaagaagagctgctccgcgctgagctgcgaggcctgcgcgatgcgctggcgcatcttggtgcgcggcgtcttggcgggcgtgggaggggccgcgggcatctccagcgcgcgcttggtgcggcgaccggcgccgcctggtccgaacgtcttgcggatgcacgcgcgcgcctggcgcagccgctcctcgccggcggcggtcatgggggacatcatgaagagccctccgtcctgcatactgtactcgctggggctgtctgggtgataaggtgcgagagatagagagagacgatcccctatttgacgtggcggaggagcggaggatggagaaatgatggggctatagggtcgccgcgaaatctgcctcttctctttcgaattcaaacgtttgaaaagatggtgttgaatacatagatttgaggtggtgcacataaatgcaagttgaagtggaagggtgaggctgagacctggcggaagaatacttttctcctccttctcctgcagttggagttttctcctgcagttggagttttctcctactaagggtaacgagagttggtgccacgtattgatagggaacaccgttgacggagatgaaggcggaatcggccatctcggacctgctgatgaagtgcgaggagcagggagtgcagctgccggacgtaaggaggctctcaacttacactcatcaagagatcactactaacaaacttctactgcctctgcatcaatagaacccgtggcaggcacttcgggaggcaatcgctgcgctgcgaaacaccaagcaccaaggactggggtatctgcagatcccgaaagccttcgagcagctcaaagccaagttcaacgcagaggataacgcagcagaggccaagccagccgctgctgctgcctcgcctcgcttgacgcgtcggcagaagcggacgctcatgcaagacatgccgagcaagcgcgcccggcgcaacttgataccagagagtgacagcgacagcgacgaagccccgggcaaccagtcggggctggtcaccgctatgagccccgtggcgagcagcaagaagaccaagtaccagaagaagagccgcctgcaagagcaagtggaggcgctgccggcttcgcgagacgagaaccagcctttggtggaccagctggtgcagttgggccagtacgaaatgcaccacggacactcgcagcgcggactctcgcgcttccgagcggcgaaggagatccgcgacagcaagatggtgatcacttcgggagctcaagccaagaagctcgagcgtgtgggcacggcggtggctacgaaagtcgaccagctactgaacgaagggctggctgctgctctgagcgagtacgagggtgacgaagaggccctcccagtggcgaagtgagttgagttgagttgagacgaccatgcattttgcagacgaatgaattgcatgtgcatgaatatgaaagagaatgacattgtgtcaacagttgaagttctcaaccagagaaaaacataaatccccgtcccagtgtttccttgtctgaacaatataacaaccgcagaccccagcgccagagcctaagacttcggccaagaaaatgaatcgccgccaagcacagcgatcgctggctgatctgatctccaagtgcgaggccgcgcacatccagctcccagaggttcgattcatatcttgtaaccatgcgcttcccaacattgatgcatcttttcgctcgtgcaatatcataggatcccttgaaggcccgtgccgaggccgtggaggcgatcgtccactcattgaaagacgggaaggtactaacagtgatgtcctccaatccccccccgtaaatcacttgaacacttactcgcgatctccggttgtgtgtcttaggcgaacttgggcgacgcgcaggaggaattgcagcagaagtacggtctggagctcgtgtggaagcagcacatggagaatgaagaagccaagcgacagcgccgccgacagtcccaaaagaagaaagcgcctacccgtgcaaaggacccgagactttcaaagaaccttggggctgtcgcggagtcaccatcagtggacgatctgatggcaccaggagacgacgaagaactccaacaggatgttaaggtccctcctaagacgagcactgccaggatgggcgtgatgactccgtccaagcgtccgaatgccgcccaagagggtgatggcgagatgaaaagcgcgaagaaggcgaaaagtgcgcggggacttatcgtgtctggaggttcaagcgacaaggaggagaaaccacccgcgagcgggaaaaaggctgcagccggtctggggactatcatcggggatggcaacagctctggaagccctgatcaagggattgttgacatgctggacctggaggacttgggggaccctgatggcggcagtggcagtgccacgagcagcgacggagagttcgacctttaagcgctgttccggctgggacgaacggttgaacagaggcactaaccgggaacagagccgtcttcgatttcgccggattcaactgacgaggtgactgactgagcaacaagttgacggcggaaacctgcgtggatttccctctatatgatttcagatcaatgcattagcgtacgttttctttgctatagcgtaagcgaagagcaaagctcatatgaaacgtaccagtgacggaagttctccggattcgactgagctgtgcagattgttttcatcgtcgaggctcttcattatacctcgagttgcattcttccgtttgacgtagttcctcttggtttcgccgaaaatttccccatcgctgagctccagtgcttcatctcgcgaaatctcaccctctgacaactcagcactacacagggaatctggaacactactcccagaggttgataaggcccttcggcgccagcgagggcgatgacgtctgggggccgatcttgtgtagcgttggaggtggtcaatttcttggtgcataccatgtagatggtgattgtctgaggtcgaactgagtccactgctgctcatcgaaatacttccccggaccacgaattcgtggctgctagcattgctcacagattcgccaacgttaaggaatttttccgtgagaagcactggctcggtggtcggtaaaggcaataagtcgtgttcttgactgtgctggtgactttggtcggtgatatcgcttcgagaggcagcactctcaaggtcaacttcggatgacaacagaggtgtcttcatctggagattcacgcgtgtagcacttatgtcgccacctcgattagacacatttggcgcttgaaaaattgtcacttcttcatcatcattggggctgtttagcgtggcttggtacgttcgcctttgctgacgtaattgctgcaatatctggatggaagtcacaggccgaaacaattcgtgcggcccagaaccactggggtcgagagaagtttgaatagctcttgcgaattgggtttgtgggagaattggtctagaaatcgtttcggccgagctcacggcatcttctccatgattttcctcggcgacacagatacttgcagcttcaggacttgctgttgtttcttcttgacaatcgtcgctggaagcttgaacagctttttcagagaggatcgcgactttggaaacctcgagctcgttagtatctgtcgcttcgtcaatccatctcgcagtttgatcttctgggaaatcagtgggagggtcttcagtattcgagtcatctacagccccgacagacgcgtgatgaaggctggcttgtttgtctttccaaattcgctgcactaagccactgacttgctcttcagtaaggacatcaacccaattttccaaattatcagagctcgagctgtcagcaacagagtcggaatcaacgttaccttgtgccatttgctcattgtagtacgcagcagctcgtctcaacccggtgacatcgtcttcatcattctggttaaattgcccaatatttctcagttgctcccgaattaattcttgggtgatctccttgacagtttgatcatcgactgattctttcccgacaagggattccaaactcttgcgtactacagaagctgcagcttcattggctgcctcgttagtagtttccgatagcattctgctaaccaaaaggtccgggatttctcttataactcgttcctcgagtgcatcaggttcatggtcagcatcaggcatttcgtacactcgaacctcttgctctctcgcaaggggggtatgagcacgagttgaatttttcgtcctcggggaatccattcttcgcgaatatattggaatcgacgtcgacggagccggtattggtaaagcgctgtcctgatcctctttccttgatatccgcactagtgagccgcggtgtaacgattttttctgttgctgctggtcgtacgcagcggtaacgaaagcgacgaactctttgtaattgatgacttctttcatcagcaagtgctgcgtatttcgactgcgcactgcttgtccttcagctggagagtgaatatggcgaaagaacgaaatgattttcgcggttgaaacggtaatctgcaagcggtgcagtgccatacatgtctcgatgcgattcacgtggccatctttgtccgtgtccaagtcactaaaaagccggcgaagcacgtccgcgttcaaacgcgtgtttgatatcgtgccaagaccatcggcagagagtattggccgcgcgccaaatgaagccaccgatggcatcgtgcgaaaatcggataatacctgcctgcctattgacgacgacgggcgatcttctgggtgtggcttccttcttcggggacttgaagcgtcaactactgatgccacatcagcatcactagcttgatccactctaccaagggcgtctgttcgagcactaaacccaaactccttcgctggggaactaggagcttgcggggtagtgtcatgtacagcttcctcaggtgagcttggtactacatcagctttcgacttcgagccacggtcaaccaccggctccgcagcttcattatcctcctttacttcatccgcatgcaaatcatcaaccagcctcatattcatcggttcctttgtggcaggatcatcccacagcggctcctccatcacagcgctcggttcttgtgttgtgatttctgcattcggcaccacgttctccttatcctctacactcccccttccgagaggaagtggactaatcgccacgcttttcacgtatttcttctcattgtcaccagcgtatgttataaccctcggcttcgccctcgtcttctgcactgccttatcactcgagactcttaaccgtgccctcgtcgtcttcacgccagctctcccctccccagccttatcctcatggcttccctctacctctccccgagctcttcgtcggccaatagccccctgggcgcccttagcccgctgccgatacagcgaaggccgagacgtcgcctcctctttcctcttctggttccagaatctctgcgccggcggattctgctgcagctctcggtcgactcgggcgatgcgcctcgccacctcccactccacgcggcgcttgtaccgctgactgacctgcagacccgcctgcccttccagagccaagagcatttgatccgcttcgcccgccgccgccgactgttcaggttgcagcccaacgcgccgccggcgaggggcagcgctcgtcatcaccagcgcgttgtccgtccagagcagcggcaggctgccgcgcagacgcgcctgcagtgcgcggttgcgcgcgctcacatcgctcagcagcgcgtagttggcgtcgaggcttcccatccgttagcgtcgctggaagatcgcaccacttcaacttcatgtggtgcacggaagtctctaaactggagttgttgcacaccttcactgtgcaagaggtaactagcacaagaggtatagtttaaatgtgcaatctattcagtcatgtatctatctatccatgcaatattaaggaaatatacacagccatcgcttcatacagctcagctcttggcctgcagcatctcgaaccactggcggagcgagtccgacaggatctccggcagcatggccgacgtcgggagcagcacgtagtacgggaacgggtagttctccagatacggcaccatgcgcaccttgcccttctcgaacgtcacgctctgcgtgtccaggatggacgtctgctgctggttactgctgccctcggtctcagcggcgccctgatccacaatgagcagcacgatgagctgctggcgctcgagcgccgtctcgatctgcttgcggatccgcacacggccgtccgagtcgaagcggccgtcagagatcaggaacacaatctgcgtgaactcgacggtgctgcttgaagcggcagacgattgcttggctgtctccagcaactgcaagatcgtgtccagcgtctgaaccatgttggtcttcttctgctggaagccgaagcggccgatgaggcgactgccagcgtcgtccgtgaacggcgtgtcgaacgcgtgaagcagctccagttcctggccgaacttgaccacagagagctctccgacctcgagttgagtcatacccttgcacaacgtcgccagcgcttccagtgccaaacgaccagcgtgattgtcggccatcgactcggaatcgtcaatcgccaacatcacctggtactgcctcttggacggacgcgtacgacgcagccagatcttgtccttgcggaactgactggcgatgtacgggatcaccttgcgcatgttgatgcgcttgcccgtacggaagtcaccctcgagcttggcacgcagcatcggctccagcaccagtcggagctgctcacacagtcgctgagacgcgccagcagtgagagcagtgtacttagcccacaggtcagcgccgcgctcctgctccgcttgagacgaccagttcgcaatgaaagagtctagctcgtcacgcaaggcagcaacctcgtcgggagtcaggagcttgaccgctcgagcctcagcttcgtcgccttcgtcctggtcttgcatgctgttggtcaggtccaagtcgcgcaaccttgacggcagcgcgtggtccgcctcctcgtccaaaagctcatgctcgccgccttcagtagcgttctcgggtttcatctccagctcgtccagtttttgctcttccttcttggtactgtcatcatccgtagctgattcaggcttaggctcttgcttcactggcttcggcgtatccttctgctcccgctcctccgtggatttctctttcttctcttcctcctcctcgtccacttccatggcagtagccccgtttccagggttcgtgtcttcctcttccttcttctcaacatcgttgtcctcttcttcctcagttcgaggctgattcatgacctggttctcgtcagcagccgccagcgcatgctccgcatcttccatttcctcgtcatcgtccacaaactccgccgtcgtcatctccgcagccttctcctgcttctcggagttcttgttgtcctgctccttctcttcctcggtgcgatccaccatctccacacgcttcttccagtgctctttggcctcctgcgcattccggtacgggtttggctcgcgacgatcacgacgtttctcgcgtggctgttcctggtccgggttgctctcaacctgcgactgtggcttccactcctgcttcgcatcttgatcgttgctgctgctctgcttttgagcttggctgttactgttgtcgtcgttgctctgctcctgctgctcctgagcatcagcgtcctccatttcctgatcttcatcttcctgctcgtcagcctctaactcatcctggccatccttcgactgagtgcccgccaccgttgacgccgcctgttcttcttcatcagcgttttcaggagcctcgggctgctcagcatcttcctcttccttctcctcggcctgctcaggctcgtcctcaagaccgccaccgccgagctgaacagcattgtcaagctgctcctcttccttctcctcctcagcgtcctcgtcctcgtcagcgccggcagtttcttcttcttcggcatcctcagcagtctcgtcgtcggcatcatcaagcttgtcaatgttttcatcatccgggttgtccacttcagcgtcgccatcgtcatcgccatcttcaccgtcgttgtcaagctgcatatcttcggggagttcgtcaccgtgctcctcctcggcctcgtcctctccgtggccctcctctcgttcggtcgggtcgacgtcgtggtggtcttcgtacttgtcctcgaagtcgtcattgacctcctccatcttctcatcatcgtctccgtcttcaccgtcttcaccatcctcgccgcccccttcatcatcggcacccttgtcgtccgactgatccaactgcggcttctgtttgtcgtcctccttcttgttcgagtcgtttttctcttcctcatcaccgtccttgccgcgcacttcatcctctagcgcttcgccctcgaccttggagtcctcctcaaacttctccttctccttgtcgatgttgtcttcgtcgtcgtcagagtcctcgccccacatcttctcgtccacaacgttttcatcatcctggtcgaactcgcccatttcgcggtccagctcctcctcgtcatcctcattctcgtcctgttcatccttctcctcatcaggcacatcctgcatggttccctcgaaatcgttctgcatttccagtcccgtgtcttcaggtttctggtcagctggtggctcgggctcttcctgctgatctccttggagaccgagaagttgctcctcatcctcaatctcatcgctcacgtccttctttccttcaccttcgcccataccagtgccctccacgtcgtcctggaactgcatcttgcccgcgcctccatcgccctcttcgtcattcttctcttcatcggtgcgacagaagccgtgctggaacaggtttcggaagatgcgcacaagcacaaagtccagcttcatgacactcttgtgcgccacaaggaagtcaacaagcagctgccggctaatgccgcgcacatcaaccagactaggctcgaagcattccaacagtgacaaagacttcaagaaaacacttcgccactcggtcgactgcgtgtcggcaagctggacatactgatactgcagcatttccagtagcttagccaactgtgaagcgatgtggttcacacgcgagtccttcaccatagtggaaagtgtagcaagctgatcacgcagtgactgctcctcttcatcctcctcactcgacttggctgcttcctgagcatccttcgagatttttgtcagatcctgaatcgacaccaatacagtctcaaccaacttgtcatagtgctcgctaaacgtagccatcgcctgcgcactctcgggctcgaatgtcttttcatcaaccgactggagcgagctcgacttagccaaggtcttagcaaacttgcggtcatcacgaacaatgccagcatactcgacaaggaaggcttcgaaacaactcggggacgtcactgtaccaaatgctacggaagtattcgacagaagagtctggatctcgctgaaccgagcagcgttcgacttgagcacttcaactgctacaggcagcttctgtgtctcaagggcttctgatgatttcgccacaaccggagacacaccgtacacacgcttggaaggtcgcgcaaacgccacaatagcagcgtcgccacccgcgtcctcgctagcgttcacagcacggtgaggaatcgccggcacaccaagcgacttcgtcaacccagcacaatcagcgaaagagttttgaatggcatcacaaagttcgaaaatgcgctggaatagctggcgaacatccagaaccaccgacacattctccgacgattgctgcaaaatctgcaccactgagatctcaagctcacgcagggtctgtcgcaatgaaacgacggatgtttgctggaatgcctgccactcactcgccgctcgggggtcgatcgcagcctcggcgtcgctgttagacgaaaggtagttcgtcttgaactgcttcaacaacttaagcgtggctagtccatcaacaagcttttcgtgactcagcgacgtggcgtgaagaatctgtcgctgctgcagcattgtgaacagcatgttttcggcataaccgctcatacgctcggtttcgctcgacgacaggtcatgcgagaagctcgtcaccgcactgtaccgcaatgaacccaactggccaaggaatcggtagtaataaccgtccgcacgctgccacagccacatcggcgtgttcttcgccaaggtctcttcagcgggcttagactgatgggcacctccgggctgtttgcccttcttctttccacgcttcttcttgtcctccgggcctctggcactggttgaagcactcaaactctcggaatcaacagctgcctccagttcatccacatgaatgcagttctccacgtcaggcacatccaactcgaacagttgctgaatttgttgttgctcagcaggcagttgaagtcggtggtacgccatgccctgggtcttcagctcgctaagcagatcaatcagtgccttcttcttcgcacccttcggtagacccgtggccttctgaagcttagccatccggtagaagattgtctcgcaaagatcctcacacaggtcacgcacttgctggcggcgctcaatttgttcaagcgacaaaatgtgcttttgagtgtacttcgcaatgcgctttgagagcgtaggaagcttcgcggcatacgatgagagttgaagcgtggcatcatcttcgtactcgatcaatggcgcgcttgtgtgattcaagcgcaacgctggcggttttccagcatcctgcgagtcctcctcattaagcagcttcgtctttttgtcggccttttcgctggcttctccttcggcagatgcggtgatcgcgtcctcatcttcgttgtgctcaacgtcctttggcacgacaacaccatcgtcaagaccagccagttccgccttggtggattgaattccgacaaatccaccttccttggtaattccgctatcagtcgaagcgtcgatcacagtttgcatcgagactgtcagcactgcatcgtaatcgcggacaaacttcatcagcttgcggtgcgatttctctgccgactcagcgagcgaatagtacgtttgttcgtcccagcggcaaatcttgacgaattcaacaagcttgcgctggattggagccttcatgccgctccactggcgctccagatatcccaggtgttggccatagtaccggtacaagtggtacagcatgttggccagagcatacttggaagacttcgaggcaaagccgttcgatgattcgtgatgctctgaagggctccaaagctccatgaacaactgcgcacagaacgagtaaaccacaagcaagcgagtctcgtactggccgatcgggcacgaacggatgtaagcgtccagagtctcgaacaacctgctcataaactcacgctgcttctcgacagtctctctggccgcatcgctgagggcttgagcgtcggccctgttctcgcataacggcgtgaaaagccacttggacagatgattcaggtggagccactgcaagttctgcgggttcgcggggatcatagcaccttcatcactcatgcccgagtctgattcaaactgcgccgtcagcagcgagtacatgttgatccacgtcttctgtgccgcaaaacgatgctgcttttccttcacgtagagcaggtgaggccaagagtatagctcaagctttcgccaacgcgtcaccaacgccgagagagcgccaagctcctcgctaattgagtacgcctttgccgcatacatttcccactcctgagccttacgcagcagcagttcaacacccgtaagcgtgcggaccagcggagagctgatttcaaagttgcggatacggtcagcgatgagtacaatctgctgcaggatcgcatgatcaggccactgagccaaaagtgactggaccttcaccatcaggcgctgcaagggctccgcaacaagcacaacttcctttaccagcgggtcacggtggaagtcaatgccgcggatgtagtcactgctcaaagaattgaacgatggcactgctccctttttggtaccgacgttgctacccaggcgggcttggaccaaagaagcggcaaggacgccggacgacgccacagcgctctcgatcgaagtcgatgccgtagcattcaacgacttgcgcaacttcacagcgagagagaacgctctagcgaaggtgcttacgatctcatccttggtaattgcaatcttggagtttgaagtctcagcgtacagcttgacgtgggtttcacacagccgctgcatgattttgtccgtgataagcacgtccatgtctgccgcatttggaagcgcatctgcattggtgttcgcagcagcagcctgttcggggctcaaaaacgcttggaaatcacggccgctgtagtctgggaactgttcacggtactctttctccaacagctcctcttctgtctccaggtccagctgacggaccttgtatttgaagagttcttcctcctcctttcgcttctgctcttcccgctccttctgctcttgccacttggtcaagaataaatcaaacaacgttttgctgctgctgagagcagtgtcaactgcctgagagtccacattacggtttgtgcgtgaagtcatcacagtttcacggaagaggaactccatcttcgcaagtgccacgtcaagcaacgccacctcgaccttgcgtttgttcgccacaccaccgccaaacataattgaagtccctaatgtacccacagtctgcaacattaactgaattccgcgccacgattgatccacagtgttcacattcaaagcagacgggaactgcacgagcgagagagccaaggtctccttttgtttctccttcagcgaagcctccttcagttgttggtagagcgaccaagtcacgagtgcaactccctccttcacgcagtaaattgccgcagcaacgggctccaaaatatccttgaagcattccccgaacttcttggacagttgagcgaggaagctttccgacgtctgctggaacatttccagctcacgcaaaagctcgcgttttcgctgctgcgataacttggacgatcgaactgtcgatagcagagccgccagcttttcagccggcatcaccgtagcattaaagcgcagtagatcgcggaaaagttccccaaacacagaggtagggacaggcttcatctccagctcaaccgtttcgattacaccaccatctctgtgcagtttgttcggttgatatcgctgaattgcgaaagctgacacttccatgacttgactgtacaactcgcgcatagaacgactagcattctctacgtcttcggctgatgccgacggtgaagggttgagacggttaatagacgagcttgctgcgtcatgcatcgtgagcatcgccaaacggtttagcagattctccttctttaccagcggcttcgtaacagggtccaccggtgaagacggaagaagtaatgcgaatctccacagcccaagtgtcaccatactctctccaatagctctcgcaacgatattccggtcatcttgcgtaagttgtgcctccctcgccacggtcgtcagcaatggcgcaacaagcggatccacaagcgacacgaatgtgctgtccgtagagcttcgcaacgccttcaacagtgtcgcttgagccttcgtatcgaacgtgagcggagtgtcagcaaactgatgaagtagagactgaatctccttccactgcgcagccgagttgttttggaaagtcgactcaaaagccagaacagttgctacaaacaactcccgaacgaacgagaagcttgtgttcggcatcgtttttcctgcttccgtctgttccgtggagaagtgattcttaatcttctccaatcgcgcagctcgcatctgagcctcacttgtggggcacatggattcttccaggtccacctcagcaatactcttcagaacgactgcactctgaacggcctggaacaggcgtgggtaaccagcaatcacctgggcgtggtcggcaacatcagtgctcacagcaggaagtcgcttgttcgccttgcgaagcttctttcgggtgtcaaacacctccaaggaaattagatcaacctggttaaagctgttgcaacgcaagaactggtggaatccaaagagcacaccattcaggtgggactgaaccacagcagtgaacttgtccagctcgacaaccgcctgatctggttgttcctcgctcatagcgtccagagaaacaaacttgtgtccgcaccacacaatgtcttggtaagcgtagaagcaagcaggatcgcggagccccaggcgcaaaagctcctcgataattccttcaagcaatgtcagtaccttcgaaatagccttgacaaccaccgcatatctgtcttgagacaaatcactcttgaaaaggcgatacttgttgagaacgcgcatcagctccgtaattgcctggagctcctggcgtgcgagagcatgctccaacagcgggctcagctggaacgtcaccatgcgatccatcagcagcgcactctccttcatatcaaacaacagaatgggcgcatccttgccaatgcggctgtcttcttcgcttagcagatccacatggctgtcagcgttgtcttcgatctcactcaagtagagcgtcttctttgagatgagtgccgtaatgtccgcttgtttctcgcggagcttcatcaaaagaacacccggaagcttgaacaattcttcagccataagagcatgcggctgacgtttcgaacgttcgcttccgctctttccgcgtgtttgctcctgagccaagtacgagaatgcacaaagcgcatgcaaaacttccttgcgggcttcaacatccacataaaatagcgaagatacgtccagcttgccactcttcatcgcggcttccattgaggcaactcctccaaacaacaacgccaagacgtcgaccctgccgtcggtagatccttcagatgcaccaacagacactgccgagaaggagctcgagttgacttgcatgaacgtcgtggccaaccggttaagtaggtattcagccttccaaaggtcagcattacttggaagtaaggagtgaccgcccttcttccaaagcacattcttcctcgatccacaaccgataagcttctcaattgtctcctgcattcgctgggacatatccagcaggtcgctccaagatgacttccacggcgcagagagcgcaggctgctcctcgatcagtttcgcaagtcgcaaaagcgacttctttagccattgccagtgtatcagaaagtgggtccactcgaacacctgcactcgcagttgaatcgaaaactcgaagcggtctcggaggacagcttggaacgtctcggcaaactccgaatccatcaccaagttgggaaagtcttggacaaacgctccaaggaaggtgttaaacgcagacaaaagcgggtgaaccaagaaaatcagctcgttctccacgtcagaacggtcagcgtggtacttgtgcacggcgtaggactgctgcagcactgataacttgttcagattgatctcttgacggcccttattcgttttgcgtttgtttgtcttcgacgatgcagctgcaaacagggtgtcaacttgcaggtactgttcttgctcgcagaatttcagccactccaccccgtcaagaagctcgagttgtcgctgggcgaccatcatagattcccacacgctgtccagttcagtcttcacagagggggcagtcaaggcacgctccgcaatgagtgactgcaatcgcagcgaaattgcgtggttggcagcaaggtacacaggcacaggaggcacggcagccgaatcgccaagcaaggcggtcagatgtccagccacttcctcaattttccgagaaatatcagtgtacaactcggttttcgtcaccgactgaaggaagcgcgccagcaactcaactgaacgcaacgtatccgcatttccactagctccacgggtaatcttctctaatgcgaagtgaaggcgatccgcagccaatggtccatcgccatggttgcaggtactcgccactgccacgatgtgacgaagcgcgaaaggagctaatgtcacagccagagtgttgttgtcgccatcatgcccgaagaacgactttgacgacaggtggttccgtgcttcttcaagagctctttgagaatacacagtctctcctcgcttacaccgtgaagcaacacactttagccacgcgtctgggttggagtcaccgtcagtaaccgcggcattttcgcccgaagaaacatgaatctctggggaaagccagctcaactgcaagtccatagcgttatcgtcacccggtttttgtgaggatacaatgaggtgctcaagatatgcaacatctcgctgtagctcgaagttttcgctctgctgacacagcacaaccgttgaaggacaagcaatcatcggaagcacacgctgcctctgggagttctcgtgcgaagtttggaaagcgcgcaggaaaagttctagtacctcttggctcaagccaagctgtgccaacagcccgttcccatacacacgttgaaaagactcggcgatggcattaagaggtgacattccacgtgagagctccgctgacgccagcaaagaccaattttccaagtgtcgacgattaatacgaccgtacttcgcgccgaccataaactctccaagtttcgttaccacacgctcatgagcagcttggaaagcttgagaaagggcgaaaccgggaattccacaggccagcggaattttaatgagatctagacgcggcgagtcttcctctgcaagcgcaatttccacgcagcggtttctcattgcacgagaaacctcaccgtactgcgcatccatcgccaaaaacattcggaagttcttgtgcggcttgatcacacgaagtttgccgttaatgataccgcactcgttgatcagcatttcaccaccagtctccatgagggagttcaatcgatccaaaaccgacgagctgcaaaaattgacattgtccaatagcacccattcacccttccccattgcttggatcaaagtgccatcaacccactcaaagcagctcgcaatcgacttcgatttgctaagttgcactacgctgtcaatatcgttcagcaagccagcaagtttcgtctgcatctcctcactgtcagcttccgttttttggagcatggccacgatgtccttcatcaaatcaacaaccacatcgtccaggtgaccctttggcaactttttcgacttgcgcgccttcccactgctgtcacgagagcgcggggaagcgttctcgctgtagcatttttcgcgcgtgataagcgcccaccacgtgctgctaaggcggtttgcctttttcagagtcgccgctttcttcttttgtgaaactccagtcgaagccgaaaagagcatcatttgctgcaacaccttctcgtacacaacttgaatcttcttcttgatgtcacggagcttacgcccaacatccacctgctcgaagcagccgagcagctctgtggcatccgttccagcactcatacccagttcatgcagagtattaccactcaatgccgccaacaaacggacagaagatgtctttccgctagccggcggtccaacaagaagtgcaggccacgacatgttcacacagtgcaccagcgcctccattggtttcaggaggaagttaaacacaggaggggcaacgcgaccgatttgcatgtcttctcgcctcttgagcagcgcgttgccgatctccacaaaaccggccgacatgcgaagggagacagcactaagatccattggtttcacaccgaagaactcttcaaatcgtcgagaaattagctcgcggtcccgagcagagcgcatcctttccacgtagataaaattcacgtagtagctcagcgcttgcagctggtgctccgcattgcttactagctgcgcctgttgcttgagcaggtcacagaaacggaacacgtcgcgcaagttaaactcccatggcgcaccgaggcgagcgtatctgcagttcaccattgtgtcttcatgcaccgccctgttgaaaccgatcattcgctcgagcagggtctgacccaccagagccgaatcgctcatgctcgtttccgtgacagcacagtgtagtgtgggatacattgagctcgcgatgtggatcagatcctgttcgtgcagtgtctccacaaagactcgggtaaatcggttcaaaaacgacttcggcagtcccttacggccaccaccctgacgaagcgggttttgagcggcaaagacacggaaagttggcggacactcaaactctcggtcgagctccggaatgtagacacttcctctgtgatccagacacgagttcaaaccttccagaacagactgtgacgcgaggttgagttcatcgagcagcacccagtctcccgctttcagagcacgcaagaagacgccatcacaccactcgaacatgccactggagcctccgccttgggatggcttgctgctgttgtcatccgtctcgtccgtaggcgaagatgcggcaggcaggtctgatccaaagagatcggagatgtctgtttgttctgacaaattgattcgcacaagacgatggcctgatgctgccgccaaagcactgatcaaactggtcttgcccacacccggggacccttccaaaatgatggggcgactaacctgcatcgcgcgcagaacgcgatacagatttgacatcgttgtgggtgccttcagcgagaaagcaggtttcctcagcacaggatcagggccgcgcgggatcaggaacggcgaaattccgaagctcccctccgtggccttttccgaggaaaacgaattcaactcatcgatgttgttgtccacagatagcgatgtaacattcagcgagtcaatcaccttttgcttgacaatctggtcatcatcaggcacgagcgccaacaaatagcggtaggcctcctctcgagccttcaaagcagtgtgcagtgccttatcagaacccagaccaagaccgtccagaatcgagagtgctgcaccttgaacaaatgccgtccaagcagtcaccgtgaccgacgaattatcattctgcttcttcaccacagacgtgataaagttgatccagctgagaatgtcacgtaacgtcacggccccgcaccctccaacaccaccattcgcctcgttgaaggttttcacaaagcttagaatgggatcgcacagcgtggacaggccagcagatgcagctggcagagcacgaggtggcgccgcaattccccggggtcccaccagacgatcacaaataatcgtagcgatatcatccaaatcggagatcgccggcacccagatttctgtgaaacggttgcgcagcgcaggagacaattcgcgcttaccgaaatcacctccaggattcattgtcgccatcactcgccacttcgagtgggctacaatttcttccacttggtcaccacccttttcggcgagtagcagcgtgcgtgaaggctccaaaacactgttcaggcgttccagcacggcatcctctgcaaggttgacttcatcgatcaagatcaggtcgccgttcttcatggactccactagaggaccatctgcccactcgaagatggactggaaccgccgcttcaagacatcgatgcgttcaacaagctccttctgttgtgcaaagtcgctgtccaagacgctagatctggcgctctcgtatttgaccagcatcgcggctacaccctccgatttgacgtcagcccggcgcttctcaacttcttgctcatcgatacaaccgtcagccacagccagaaagtcaatgagtgcctcttccaattcgtgcgcagttttctcctttccacgcacaggccgtaagcagcccaggaaatccgaggtctcggtgtgctgatgacagttcagaatgtgaagcggttgagagaaaagaagcgagtacaactggcaaacagtggtttttccgcaaccagtttctccaacaagcaagacaggctcctcgttctgcaaacagcgaccgacaagcgcaaacagtctccgtagtgacttcgtcacactgatcttttctagacctgcagcattacctgccgatttaggctcaccactagacgttttgccggttgcagcttcctcaatcgcttgttccaccatggcttggacacgctcgaactgctccttcgtaccccacacggtctcctgctcaatctcaccgttctcattcaacaggttcgattcacgaggtttgccgctgtaatacagggcatcaagatcaatctttacattgcattttttctccaaaacttgtttgaccacttgtttctcctcatccttccgcagccgctcggcaagcaaacagtatccttcttcggctaaggcttgcttcgttgccggccgacgttcagcccatcgaagcaagtcacgtgtagtgatgaagcctgacttgccagcgaaaacggacgattgctgccggacaagctgcagttggcgcatgatatcaattagaattccacagtaagagggaggcagcgagcttcgctcctgcagaatagtttgaagctcactagacgcaacctcgtccacttgaatctccaagaatcgattacggaacgcgcgggacaaaaccttacgaccaccatacaaaccaggtggattctgagtcgcgaacaacatgaacttcgggtgcggtttaacagtctcttgtgtctctggcaagaacagctcgcggttgtcatccagaagtcgattcagagcctcgagaacctctgaaggagccaagttcagctcatccagaatgatccaccaaccctttcgcacagcctccaccaaaacaccctccttgaacgccaacttgccgttcgagtcggacacgtaactccccatatactcctgaatgtctgtgtgctcgtggttgttaatgcgcacacatttctgtccgatacgcgcagccagataaccaatcaatgacgttttaccagccgacgttggaccctgcaacagcacagggtacttgccgatcaaagctgctcgagaaacatggcgcaagttctcctccacggacttcgtaagcacaaacttccgtcgagaagtcactgggtccggcaacgagtcgtctcgaggcggctgaaagtcaccctttcgaacccagtaggagctcactaagacaaattcgcttgtctgtttggaaccaccagggcacggaggagagcgcttgagctccttggccctaatcgttttcgcaaacgtgttcttgatgagcttttcaagatactgacgcgactccatctcgagctgtgtgcagaagcttgagcaaaagccttcaaacattgctcgagacgtaccgtagcctcgttgaatcaagatgcgcgtaatgtgcagtgcctggctgagtgtacggagagagtagcggggcttgtggcgcgcaccatcactcaaccgcaactctgcttgcttcctcgcctccaggtaaaactccaccgtttctggcaccagagcgcccgcaatttccttgaactggtggtgaacgaccatctgcaagtccgaaggattgacgcattcgtcaacgtaaatctccgtaaagcggttgcggagagacggaggcaaatctttcttgccaacgtccgtcgagggattcatagcaccaaacagtctgaagttcgggtgtggccggattacttcgacatcaccacgctccgtgagcgagaatgcacttgtttcatgttccagaagggtactaattcgctccagcgtatcggatgaagcaaggttgatttcgtcaagcagtacccaatgtccctcacgcaatgctttcactagcacaccctccacgaatgaaaaggcaaagtgtgattcagcctgttctttttggcgctcaaaccgaatcagctccgcctcgaaggtgtcccatcggctcaccaacacacttgtagaagcaccaggagtagccatcttgttgctgacagcagcctccgagtcttcttcattgcgaccagttccgccgctgctgctctggagcttagaggtagccatctggatcgcttttcgcatgcccttaacgagcttcctccagtccttgtgctccagcgcaattcgaacaacgttaagaaatccagcgttactcttctgcgaaaatgtagcagtgaacagatccacgaaatccatgtacaacggccgagcgagtagatgaatctccacaggtttgaatccgcccacaagatcagagctatcgctctggatattcaggttctgaacaaccaagcgctgtcccatagccgctgccatgtgctggataatcgtagttttaccacaaccggtctcaccgatgagcaaagctggctcacaggttgcaacaattgctgccatcttctccagcagccgaagaacgtggccagtcatcacaacggagctggtagcgggtttatcgccttgctcaagctgggcctgctgtgacaaggttggcagatgcacccgaccaaactccacttcgtgagtgctgaatgcaacgtgaggtttgtgctgctcgaggtaatactcgatcttttccgcctgtacttcccaaatcgcagccagcgcgcaagcagaatgtaagcgcgtcttcgggtcgcgaattccagcgcaaaaaacatctagcgcttccacaacgatacgcatacgttcgtcctcagtaatgtaatcgtggctggaggatgcgttctcttgagacgtgcccgcagcatagtagcagaagcggtagatgcgtttgcaccacttcaacagatcgcgcagacagaaatctcgcccataattacgacgtgtctccttccacagctgcacaggtccaccgacctcttcgcttgcattgccggagactgcgttgtacgttgtcatgatcttggacacaacctgtcggggaatcttcacaaaccgagtcagcatgatctgctcgatttcgctgtctgctagtggcgcaacaccgacgcttgtccagacggactcctggaatcccttcggcatctggtgtccgtgcgtagtcgtaccaaagatctggaagttcgagtgcgccaccagcagttcgccacgaccaggaagcaccatttcgcgagtctcgagcaacggcatgagcgccgccaggacctcgaacggtgcgcgatcgatatcctcaataaccacccaccggccagcaagtacggctgtcgtgagtgcaccaggttgccacgtgaactcgccggggacgtcagtgcagacgtacgatcctaggagcgtcttgctgtcaatttggtcgtccaagtgcagctcaaccatgtcaccgttgcccgatagccgtgcaagttcacgaatcgtagcggtcttgccgcatcccccgggtccggccaccaaaatcggccgcttgagaccaagagcaatcgcaagcgactgcaagttccgcttggtcgatggagtcggtaccaacggctctgtggccaccgctgcatctgaagagacctgtcgttgctgatgcagcttactcgtcgggatgaccacgccgaaaatgttctgcagcgagtcatggaagggcacaggctgcgactctgcaacgtcgctgtcgtcctgttcctggtgtacgctcagttcaatgagctgttcctgtcgcgtcgcgtcctcgctgtgcagatccagttcaatctgccgcactgccgggctgtctccactcaaggccgcatcctcgccgacgcccagtcccttcaagaagtcgttccgctgagcgttgcccattctgagcaccaaggccgtggcgcgtgccgcgtaccagcgcacgcgcgcgtcgtcgtggaagcccagcgggaagaagggagtccagttccagagcgtcgtgagctccgtgggcctcgcccgcagcagcagaaatgccgtcttggcgatacgtcgcagccgcgcgagggtctcgtcgctctgctgcttctgcgcagccaccacgtccgcgaacgtgaagaagcacggcgccgtctcgaagtattgctgcgccaaggtgctggtggccggcaggtacgtgagcagctcggcgagcgtggccgccagcagctcgctcctcttcatgctgtccgcgcactcgcggtactgctcctgttcttgctcgtacagcgcgagcgccgggtcggtcaggcgcaccatcaggtccagcaggaacggtcgcaggtgcttgacgaccagcacgcgcagctcgcggtgcacgaggcacgcggccagcgcctgcaactgcgtaacgacggcgtgctcttcaactgtaggttccagtgcctggagagcagggtggtgctgtaggttgttgtcggtactgctgcgcgccgcggccagcagctgccgcagccccgtgcgcaggcggcccacgctcacctggcgctgctccgccgcgtcgtcgtgctggtcgctggcggcggcgcgcgtcgcgtcatgtccgtccacgtcggccatccggggtgcgcagagtgatggtccgtcctccacgctcgtgttgccgtgaagcggtgtggacgccaatgccatgcgcttgaagcgacacaaggcaattgactcgcggagaccaaccaacgcgtgaggaccaaagtttaaaccgtatcggaccaaaatagttgggcatgtgtagaaacgggtgaattgtgctcactgttacgagcctatttcgtaacaggggagttgaagtgggcgtgccttggcatcgcgctttaagcttagctcaagacgctagggcgatcgccacactcacctttatttaaaagccacaacatccaagatggactaccgtaatgtcctacaaactcgggcactcagaagtcgaacgctaagcaccataaccacgacaacttgcctaacgtgtgatgaacttgacctcgcgcgatagttgcacgtgagtagtccacatgcagctcgctgaagccaactgcgcatactcaccgttgatgaatggccgaagcacatacatgtagaactgtgccgcgtcttacggcccagggacctgctagctgaatcgtgctcactccacgcgcccgttgcgttctgaagcaagccgagattcgtggtggcatcaggctcgctgctttatctgtggcaaagtatttgctgtgtacgtaagaagatgcaattgacctcgttacgcgacgctgttctcgcgaaaaggttgtcgcgtcatgtgctcctcctgacgtttaagctgtccatccatacagcatttccagcgttcagtggcacctctgccctcctggcatgatattgtccggtatcgatgcctgcacggaaagcgtgctgttcttggacctcggttttctcgggtcgtgcttttggtttcaaggcttcatgatccattgaagtgtcaatcactaccacgcacttgacatggctctaccaagtatgtaggttgctttcaggactgcaatatcttgttggagctagctgcttcacgtgacacgcaagcgtttttagcaaactcaaaacgcgcttaatgagagtggcactgttctcgtcacccttaagtgtgctagtccgtgtttggtttgtatcgtttgactgctgaagtggtgtagaaacaatcggaccgggactaagacgaaagccttgtctacagcacctgcagcttcaactttcaattcatattcattttgcaagcaagcatgtttatagagtacaataatagcaggattgcggcatgcgaggtcattccgagacgatttctccaaccagataaactcctgctcaagctgagtgtaaaattcagggatctaccttccttgcaagcacttcataccggtccacaaccgatacatccaaccataccgatgctgatcaatcggtataccgatataccggtataattgtgacgccttgcccggcggacgtgtctgtagacagtagtaccggtttttgactggtcgtggcgcatagccaggactgtctgcccatcacccaagcaggctggtttggtgggggcgagccgacagacgttttgtcagttgcgaagcagcagcagcagccaggacctcgccgccgccatgttgaggacgacgcgcgcgcgctgcctgcccgccgtgcgggccgcgctttccgcccgcagcaccagccgcagcatcactggcagcagcaacggcgaacgcctcccgcgcctgtccgacctggtgctgatccgccacggagagagcgagggcaacgtggcccgccagcgctccctggccggcgaccacagcctcttcgcgggcgagttcaagcaccgccacagctccaactggcggctcacggaccgaggccggcgccaggcggcggccgccggcgattggctgaagcgcaacaacctggcgcacttcgaccgctacctcgtgtccgagtacctgcgcgccatggagacggccggccgcatggggctgcccggcgcgcgctggtacgccgagatgctcatccgcgagcgcgactggggcgccatggaccttatgagcgagcaggagcgcttcatcaagatgcaggacgagctcaagcgtcgagagctcaaccgattctactacgcaccgcccggtggcgagtcgctggcggcggtggctcagcgcgctgaccggttgctgggcattctgaaccacgagtgccacggcaagcgagccattgtcgtggcccacggagaggtgatctgggccatgcggacccggcttgagagaatgtcgcaggatacgttcatcgagctgcaggagtccggacgcatggtggaccagatccacaatggccacatcctgcacttcacgaggaaggacccgcagacgggagagatggccccctacttcacgcacgttcgctcggtgtgtccgtggaatgagaagctcagccccaaggggtggatgaagatcgaccgaccggtgtacgacaacgagctgctactggcgacggctgagcgtgtcccgcgaatgattatctcggaggagtaccttgaaaagacgtacaatggcgccaagacgctgtcggagggggaaatcacgccggaggtgctatctcacgcgacgagcttgagccaagctgctgcgtccacagaaggtgcaaccgcattgaaggaatcaacgaaagaggaacgccagacaccgcttctgatccctgggaagcccatgctgaatctgaagaaggttgtcgtggtgaagaaaacctctcgatttcagcatgaagctgacttgtacggcaataccgggtaggttgggctagttgttgactgtcgtgattgcaatactgattttttcatgattttttcgcacacagggaagcattgagaaagcaaatgtcaatgcgaggttttgttcacgaccggttgaaggcaagtcatgagcaccacgtcgaagctgtggaagaaatcaccaacaggtatgtgcaattgctgttcttgtgcgtgcattgtttgtatttcgtgatcttctaactcatgaacgttactttagcttcaaagagcgtgacattgaggtgaaggtcgtctcagcaaaccacctcacgcatgaagcagtggaaggaacggacatgatcttttctgcgggcggtgatggcactttcctgaaaactgcaagctttgtaaacactccgatccctgtggctgggttaaacactgatcccaagcgaagcgagggaaacttgtgctgctacaaggtggataatgttacccaccgcttcagcacggcgttggaccgcttgctcgaaggtgacttcaagtggcggctccgccagcgaattcgtgtcggtatggtgaatcaggatggctactggtatgagctaccgcgctacgcgctgaacgaagtgttcatcgcggaaagtgacgcttctcgcccatcgcactacaacattggcattgaccagcaccagcgcgaatcccatcgcagcagtggaattcttatgtgtactggaacaggttcgagcgcgtggtactctagcgcggtacgtacaaattgagcgttgagtctgactcggcgagtggatttcaataactaactcacccatgttgctcgttttcacagtgccaaatctaccgcgagcaggttgctactgtgctcaacgccatggaccacacacatacgaacgagaccgtcaccgagctgactgaatcgtaagttgtccctgctcgtcaataattcttgcgaaataagtgctgacgatttacgtgtgcttgccctcctgacagtattaacaagcagaacgttttccccgaagattcgagggacatgggctacatcgtgcgcgagccaattattaatgcaaccttcggtgatattcgcttcagacggtaagtccggctcaacataatttcggagcaggcaaacgcacttacacgggttgctgttcatgccttcttgttgactgcagaggcaaagctcgccgagtatcgatgcggtccctggggtgggatatgaaagtcaacatagatggcatctactcggtgccgctagattatggcgtccaggcggtcatgaagattgttgatgagccaaaatacgtgcttcgcaccgtggacttctctccgctaccaggctcggcgcccaagaagaaaatcttttaaacgggaagcaagcagttttggacatgccaatacctattcaaccaaacgaggtttgctcagagcttctttcattattttgtctgctttgtagtagcagggatcggttatctgcgagtccgcgaacgggacctcgagcgggatgaagagtggcgacgacggtaccgagatgacgaccttcgagacgatcggtcatgcgatcgggaccgcgacgaagaagccgagtgttggcgactgcttcttcggctccggtgacccttctcacgccctcgagatcgcgactggctattgctacgactacgactgcgccgtcctcgagagtgcgaatgacgtgtttctcgtcgtgggctcgggtttcgacgcttggggtcattatttgccggtacgcgatcccgcggcggggagcgaaggcgctctggacgcctattctcgctttcgtcccgggtcggttcacggccacgggtggttcgtgcaaccagctcttcaaacagttgcttctgcttctgcgccgaaagtagcgccgcagactctgcggagctgtaaaattcctgaacaagtttctgcacctcgccactctcccatcgcatagccgacgtgtccagcgtagtgagcttttcttcgaagaacttggttagccgcagttgctctccatctcgcttcagagcctcggtcttgtattctgccaccgcttttgcataaatcttctcttgggctgacagagtcagcaatgccaacgcgttttcttggacctgcttgtagcgatcaggctggagctgttcttcaagtgtcgaaataaatacactcagcgttgttttcggctcccacgagtcgaactggaactgctctttcagtaactgagcgaacgcttgcttggcctgcttcagcttgcccttcttgtccgccttaaggtcttctcgacggtgctcgacaaagtgttcaaaaatcgcacgacgctcatccatggtcggcacacccataaatcgggggtctccagcaatctgcggcaacgctaccgaccacttgcagaacggcatgatgttcttgtcgcgcagcatcgcgcggaactgctcgatgcgcttttgttcacgcgccttacgttcctgctcctcctgaatctcctccgtggtcagcggttcctcctcctcgacttcttgctgtggtgttggctcctgctccttaacttccttcccttcgctggtctgctccgcctccgccacagcctcgtcatctcgcttctccttctgctttttctgcttcttgtgtttcttcttctccttcttcgccgccttctctgcttcttgcgcttgcttctccttctcctttcttgccaactccgccatggcctccctctcacgagcctctgcggctgctgcagcttccgcctcgccccactcactcggccgctcccacaccgacacgcgcgtcttcgagttgaagtagtagagcgtgccattgcccgcgtcgtgcgccgtccaaaccccggagcgagccactgcgttctgcagcatgagcttcatcatgaactcggtctcgagcgacgcaaggccatcgggcacttcccattgggacgagtccgtcctccggtcgtagtagaagagacgcccgtcgccgtcgtcgtgcacggaccagtcgcccacaacctgcagcgcattgagccagtacagcttctgctccgcagtcagttccgtgtcgctgggaggaggcgaaggaggcggcggcggcggcgtgtggagctccatggcgatacggtaatgatgcttgtgttcgtaacataacattcgtgtggcgcacacaaactgcatttgtgcagaccagaactagagatgatggcggcggtgcagggcagcagcgcacggcgggcgccgcccaagcgccgacgcttcgagacggacgaggagtacgaggaggagcagttgctgctggacctcgaggcggagctgcagcaggtgcaggcgctcaagtcccagacgcagcagcgcgtggcccagctgctccaggaccaaaagcaactggagcagcagcagcggcgactgcagcgccaaagcgaccgacgcgacgccggcgccgccacagcgcgcatgctgcagctccaggagagagaaagagagcgactcgccgcggcggaggccaagcgcgagtgcgacgagaaggaggccaaggtcagggccgaagaggcgcagcgccgccgcgagcatgccatcgagacgcgggacggcgacctggacgacctcgacgcgttcttgacccaggacgccgctaacttctgagtgctgcggtgcaatacatgtatatttattgcggtgggtatcgttgttggcgcgttgtcggctgttgctgctgccttagctcaattaatcgcccccttgttggcgatgccagattacctgaaataagcagtggtgacacggcggatcgatattcatgaatgaagactatggggctcgcaggagcggatctgctcgtcttattcgcatcaaggccagtctgaggcgggtcgggcactggcccgcagcgtccagatggcggagaagctgtcagcgacttcaacatcgaaacacgtggatcgcgcgcgcggtatataatagctgcgcagcagcagcagcagcttctgcgtctgtggagatcgggaagctgtcgctgcgctcgcgacagctccatgttcgcgcgcctcattaaaagcgttgctcggagctgcgccgcctgtgaaatgatgagtccagtacagcggcgagcacggatctttgccccgccgacttgcctctcacatcggcgcttaggaaaggcccatttcagatctcagcagcatgcaaacctggcgctcttccattttcgaacggcgcgtcggagccagaggtgtcggatcgcccagccatgccatgcctgatggccggagtcagtgcgggaaacagcgcaattgaaacggcgcgggattggtcaaaagagggcgacgcgcggttggccgaaaaggcgctgtcgtgccgacgattggtcgaaaatatctccctgagttctcctatgggcgcccagccatgagtgagagagcgaggtcgggcccccgaaccccgcaccacaacgcaaaagcccgaggaaagccgacgatatccgatcgcccggtgactacttcctaccgagacagaacacaaccccccccccaccgcagctcccgacctgaccccctccccgaaaggaccaacactcccgcctgcacgcacaacgccttgtactccgtccgcccacgcccatggagaccacgcccaccgccaaggaaatggccgacgcggccaaccgcaagcgcaagatgacggcatccacgccaccgcccggcctcaagcgcggcaacaagctgtcgcggcccgcggcctccgccagcgccagcgtgtccaacggcgtgacgccgcccgtggtgacgccgcagggctcgatccacacgtccgagcagttcatcgaccaccagcgcgccatgttcagcgccgccgtggcccccacgccgcacggacccgtggagcagatgccgcccacgcccgcgttcgtgaaccgcaacggcttcagccacacgcccgacggcttcgcgtccacgcccagcgacggcttcccgtccaacagcgccatggcgcagcagtcgaccggctcggcttccacccccgcggacgacggcaaccaggcggcgggcgccaccgctgctactgctaacggacactcgtcgcacgcgcccacgccgtcgcccgtgccccgcgcggcgcccctcaacctccgcaactttgctaactgggaggtaggcagtcgctacacgctcgtgcggctcctcggcaagggatcctacggacaggtacgacgcaggcctgatcgatcactctaacgtgggagagcaggtggccctatggtgatgtaggcagaatgctgatttagaacattcttcttgtccttttggtgtgaccccacgcaggtcgccgaagccttcgacacggaacgccagaagaaggtggccatcaagaagatcattaacgtcttcgaccaggagatcgactgcaagcggttgtaccgcgagatctacatcttgcgccgtctgaggtatgtagaggcaccatagtttcttttcgctggatttttgacatggggagtcttactaagcgttgtgttgttgtgcagccatccgcaagtgatcaacctgatagacgtgatcccgcccgagaactatgacaccttcacggacctgtacctggtgttcgacttcgttgacacggacctgcacaagctcatcatgagcccgcagtacctgaccattcgccacatccaagtcttcctgtaccagcttctgtgcggcctcaagtacatccactcggccaacgttattcaccgcgatatgaagcctgccaacattttgctgaatgaagactgcacgcttatggtaagccctggtggacgccgttcgttacccaagcgtcagtttatttttctaacgattattttttgtgtgacttcccattcagatttgcgactttggtctctcgcgtgttatggaaagcgatatgtcgatggaggagctgagcaagcacttgtactccccgaaggattcgaagtcgccgaccacgtcggacggaggaaccacctcggccccgtctcctggcagcgcatcatcgacgccctcttctggcgaatttccgaagatgcggcggcaattgacgaagcacgttgttacgcggtggtaccgggcaccggagcttatcctccttcaagattacgatttttccgtggatatgtggagcattggatgcatttttgccgagctgctcagcatgcaggtcgagagctgccctcgataccaggagcgagtgccccttttccccggccgctcgtgctttccgcttagcgcagaccgccccacgacgtactcggacaaactggatcaactaaacgtcattttcaacgtgattggcacgcctggcgaggacgacattggcagcttgggcgaagtcaagcagtacctgcgaaagctgccgaaaaaggagccgagggaccttcgtgaggtgtgtactgctcgattgaagcggattccacatgcggataactggctaacctgctcgtctgtcaatctcgtagatgtacccgggcgcacctgccgactcgcttgacttgctcaagcagatgctgtcatttaatcccgagtgccgaatttcggtaagctgagtgttgaattcaagacagtatcatatgtatgcatcataactaaccaacaattttgtgctgcgaacctttcaggttgacaaggccctcgcccacccgttcctggagtcagtacggagggctcagtcggagtctgtagaagccaacccgttcgggatggagtttgaaaacgttcctctgaacaaagaagctctgaaaggttcgtttaaccgcaattgtgccgagttagcaatacttcacggagctaacctcatgtattttttaatgatgcacagcccgtatcttcgaggaaatcaaactgttcgcggatcgcaataaccggagatgaaagaagtcttccgctctgttcgaccgcgacgggcagcctcgacctggtccgtcttcggcttgcggacatgaagatggaatccgacggaaatgatgaaggaacagccggtgttcacagttggtgattgtcggttagtttgagtatgtacaatgtgaggaacggaggcaagaacgaaatggcgtgtggactacaatgaagctacgaagtcaaatggcaatcgtcttatctaagacagctgactcctcgaagagaagaggagccaagtgcaagctaaacccgtaggggttgtatgagcgcacgcgttcgttcttgtcaccctgacgcatagaagcaagaaagccagcccggagagccgagacagaaagagagagtgaaagtagtaagtggatgcttgccatcgccagcacgaaaatagtagtagacacattgctgccatcaagggcagaagtagggcgtgttgcttgtctgtaggttggcttgtcttacgcttccattgcgacatcgagtgtattttcaatagataaacagattgatcgcgttttccgtagttgaaggcgttgaatgctcgttacagctttatttttgccttcctagtcagcggagcgttgtttcaaaacggataatggagtgcgcaggccatgatgggattgacgacagctacttgctcagtgacaagcccatgctaaacacgttgcagtcgttcaccgcgacttcctgacgctgcgttcataacccccccccatggagaccagcgtggacacactcgtgtatcaattggaagacgacgacaccaatgtgcggtggaacacgctgcagaagctccggcggatcgccgcggtggaaacctcgcacttcccagttcgcaacacccgccgcttcctgcagtgtgttcgacggcggattgtcggcgaagaagaacccaacgtagcaatcgaggcgttgaggttgctatcggacgtgatggtctcgctcggcgacaacgtggaccaaatcctctcgtccattttgccgcacttgatcccgaacctaccgaggaaacgcaagagccaggatccagatggggatagtgacgacgagaaggatatactgcaggaggagatgttccaggtcttccggaagtacacgaacgtcacgaatgatctgcaagctgtcgccgatctgctcgtcaacatcggcctgggaagtggccatggatccgtgcgtgaaacttcgcttcttgtattgatgcgcctgctggacgaccgttttcagaagcgcacaatggcacgaggcgactctgcgagaagtgcaataggtcggggagacaaggcgctcattgtcgcgttagtgcaagctatcatcccggcactggaggactcgaacgataaagtggtggtagctgcggaagaagccattgccaagctgcagtcgtactgggggagtcgattctccagcgaagtgatgaagtttctgagtagtgaagacaagcgaacgctaaacgaacaccacgagcctatcgcggacttcttcagagcttgctcgattgctccgtctcccccgccttctccaccacagtcatcgagaccgaattctgctgcctcagcttcgagcgatagacgtatggggtcatcgtcttcctcttcgccatcaaaagtccatccactgaacgcgccagatcaattgcacttcggcttcttgaaaggcgacatcttgacgacattattgaccaacaccagcaattcaaacgccgactggaagaagcgcgcggcagcagttgaaaagctctatgcagcctgcaagcaggtggacgtaactacgctgcgcggagcgacagcagaagagcgagccgaacgaatggacgagctagacggactgtttgacatcctcgtccgtcttactcaagacgttgacgttcaccttgtaaagcgagcgctccagatcactcagatacttttccgcaagttgagtccgccgagacagcatgccaatgacggcaacgacacggaggatgataccccccgagagattcaaaaagacgctgcgttctacatgacaaagatgctggcgcctatggtggagacatcggcgaactttgcaggagacgacgatgaaatggaagggtttgtgtatgctttactgggccaagtcttcgagagcggatgtgtcggtgtaagcctgattgagcaagtattatcaaggacttcacttcggcaccgacgggcgcaagtgcgggaggaggcactcaaagtttggatggtgctccttctaattgctgagcgtgaagatcttctaccaactaagtatgcaccgagcgaggatgttgtgcaaacgctcgggcgattacttggagacacgaacgcgcatgtgcgtgacatggctttcgagactgctgctgtattaacgacactatgccattgcaatatctacgctttactagaagccttcgttgacgacgagtatgttgcagaccgagtggactgggcggcactgcgcgctaggctgcgacggaagcatatccccgagctccggtcaaatagtgccctacgacttaagtccactgctgccgttggaagtgtcagctcaagcaggatgaatagacttctctcgagtgtggagcaatctctggacggcgtctcggagctgagaatgatcgcgacaagtgatgaaaacctcccaactgatcctggtcgatatgtgaagggtaaagtgacgaccggaggaagtctcagtgatcgctcgtacttcgaccaacagaaccgatccaccactagtgaagaaggcccaacgacggttgatattggcgataagctttccgctttgagaaagaagatggaccaacttcgccaacctcgtaccaagcgcgttcggcgtcctaacagccaggaaaacatggctacaagcgctgcccaagtctttgaaaacccaacaaactccaagcagcagcttccgcgctccaagagctcaccggagcaaactgcgtacaaccctgcagatgaagtggatgatcagactcaagctaaaaaggacgtgaaactttaccagtcccctagagacaaacgagcccacccgggaagaatcgcggttgcattgccatcttccgacgctttcacgtctccctctcgacagcctgcccagcacagtcctcagcacctgcaaagtctgcaaagtgatgcccgaaactatgaagaccgcccccttaagtccaagttcatcgagcgacagaaggaactagaagcaggcgagttgtcaccttcccagccttcgccagatgagcgccccattcgcccgatggcaacatcaggagatcccgatcaaatctatctaaacctcggcgaccaagacgcaggggatatcgacaacaacgaagttcgctcgacaaagaaaaataatggcgagcgcgtcatgaccttagcgactcgcaaacggctagaggcgaaggcaaagcaagaagcccaggctggtagcttgactgcagtaatctctccggagaggtccaaagcacgagaggatgacgctcagaagccgtggaagaagccggcaaagaccaagtttggggacgaactcgacactaaagctcgaccttctggcaagcaggagccacgatacttggagccgcatgagatcactcctctgatcaactcgaagcaggatctcagcaaagtgctcacgcagcttcgaagcgaagactgggaagcgaactttgacgcgctgagcacagttcggcgactagcaatgcaccatgcgagcatgatcgatgctggtaaagtgcacgcaatcgtggttgagatccttaagcaggtgccgaatctgcgctcctctgtctcgaagaatgcgttgttggcacttgaatcgatgtgctctgctttcagtcgaacaatggactccgaagtggagaatattgtccccgtgttgcttaagcgctgcgccgactcaaacgcattcgtgtgcgagtcagccgcagcctcattgcatgcagtggtgctcaagtgctctacccctcgcgttgttgctgcgctcggctctcacgtgagcagtaaagcttcaccgatccgtcgcgaggtagcacgcggtgttcacgcactcatcttgggcctggcggtcagcatccatgcaagcaaggacttgtcctcaattctccaactggtcggccgatgccttgaagactcgaacaacgaggtacgcgacatcgcaaaacagtcggtcctgtacttgcactacaagcaacgcatgtctggggagcggatcaagaggtatctgcctgctgcagcgcaaacgaaagtcgacagtgttttgagtggcaaagtcgggtacgctccgccagtgcttcctgctccttccagtggacttgaccccgcctccgatctgccgtcagcccctgcactgaagaaacgggaggcgcctgctgcaccagttagagccaagaagacgacgaagccactgtccagtcgaacgtcgccgcctacatcgagcaacggaactcgatcaactgtcaacgccgaggaactgactcgactcgagaccaagctcgacagcagcaattggaaagaccgctttgatgctctcaatgagaccaccgacttcatctgcagccgtgcgtctgctgttgttgagagcggtcagatgctgaacctgttcgacctgctcatcaagcggctggacgacggcaacgccaaggtgaatgtgctcgccctcgagtgtatgaaccggatcgtccccgccgtaggaagtggaatggagcaggtgctgcccaattttgtgccggccatcaccaagaacctcgcgaatgctcgaacgtcgtcgttggctcagtccgtggtgcagcagctctgtgcacacgcggacaaccgatcgctgtgccagcaggtcgcgattcaagcgcgcaattcgaactcgcgcgttgtgccagtgttgctcgatacactggcccagctgacggcgcagagcgttgacgacaagagcaattacgtgctcactcgccacgttctgccattggcgctggacctgcttaaagaagccaagagcggcgtgaaagaagcgaactcacggctactacgagagctgcgcagaacactgggaagtgccgctgtatccagtgctgcgtccaagctgagcaccgcccagcaagataaactagccgccatcctgcgatgaccagcatcaagtacagcaacttcaactaaatgtagccatcgaggcatagccagtgcagcatatcctattttgcgtgagtaacacaaaatgcaacattgaaggcttaagttgctggcttgaattttgaacttggcgcgcgcgccgtccagtcttcgaatcgcaccttcaagcgccagcgccgtgtagagtggagtcgagcacagccagcgaacgccatgtcgaccccgcagaaggaggagaacgaccagcagccgcaggagactcagcagcagcaggaggcgcagccgcagcagccgcagcaggaggagcagcaagagcaagagctggagcagtcggaggcggaggagaagcagacgcaagacaccgagatggaggaggtggataccaaggagacggaggaggcgactgaggaggagaagaaggatgaagagaacaacgaagagaacacggtggaagagacggagatccaggaagaagagaagaaggacgacgagaaggagggggaagaggccaaggaagaagaaggagaagaagaggagactgcggagaagaaggaggagcagcagctgaagaccccagtgaaggccgcgacgccagtggccaagaagacgccgagtcaagctgcgtctgcctccaagtctgttgccaagaggaagttggaggagccttccacctcagaccatgataagattaagaaggctcgcgcgtcggtgcccgcgaagcctaatggatctgccaaaaaggtgaccaagcccagggagttttccttcgcgagacccactgcgtcctcggcgcgccgcacagctgcggtggcggcagaccatgctaacgccaaggcgaagcctacgcccccgccggtgcgcaagccgcagcaagcgaagcacacgcctgccaaggtccaacgtgtgtctatgccagcacccaagaccccggcgatgactggagcagacaaggcttcacgccctcacttcaactatactccgtacactggccccttgccgccgctgaccgtggagtccagctttgcgcctaagaactcgtacgtcctggaccgtggagctcgcaccgcgtctcctgccaagactgctgctcggaaaccgcggcctgcgtcggtgaagaaggcacagccgcagagctcgaccggtaaggaaaacaatggtgtgaacacggatggaggtgtagctactaacggcgcttccagcagtaagacccaccgaacccacatcaagtccagcaccggatcagtcgtgagcaaggcggagaaccgttctgcgttcaaggagaagatcaagagccagcgctcgctcgcccagcagacaacgaggtccagccccacggctacggaggacccgacggcatagccccacaacgcaacgcaacgcactgctgtaagcccccctcgtatatatcgtgcgccattcctatttgcatgacgttagctctaatttcaccctccttccaacagcaccacgggggcacgccaaataatgaactgtattgccgtccatgactgtctgtgactgttctctcctttctttagactcgccgcaaatacttcgagctaccgtgttattgtactcacaattgtaagagctttgaaggaagaaccatggcacctgtagccgctccgcgtcctcccaagaattgggttcggcaccatgttgaccgacaggttcgtcccgcacgctcgaacactcgatccagaacgaccaccagcgctcgcagtgtatatgataccgctcttcacattgacgatgaagcttgtgaaccttctcaacgccgaaaatggagacgcctcagtatggcgaggctggagcaagcgcgttggtaccagtcgtggatatttcttacagcactggttgtgatgctgatggtttgtctgagctggacgtgttggttgctgctgttgacgattgcccccaacgataccatcaattatgtcatgcggaccaaagatctcgacggtggttccttttggctgctcgtcgagccttcaccccaactccgagcactcagtctaggtggtctttccatcgttgcgttgggatatctctacattggagggatgctcttcgcgtggggacggcaacgaattccaacagcagtaagaagtggaccagcgcttagcgctgtgcaggagactaactctcttgtgaaggcattgaggggcagcacaagacgctcaacgagttctttggcttccattcaccccttcccttcatcatccgaaacagacccgccagtgtcaggtttgctgggcaagttaacacatctgtactccgatttgtggtgtagtgagagcgaaactcggaagattgcggtaagtgctgctgtacttgaatcctgcttcaatcttaaactaactttatctcatggcagcatgtttgggtgaaagtcgtagatttaatgctccaagagttcatgctataccagattctggaagcaggtttccccataccgctcgtcgtggcctgcaccttgatggttgtgtggaatgcggtcgctgctactcacccgcaccaccgtctcaaattggcgaagctcttgtggataccatgtacgttcggtgtgcattaccctgcttctcactgaaaatatgtagtcgtctcactcaactcggtgcagttcggattttctagtggcagttgtctttcctgctctagtcctaacgtactgcctgaccaacttcgacttcgaccgtgcaacccaacgccttgcggcggatctgtttcctagctggtcattccagaacgcagcacgggtgcatgcgaatccagaggagacagcgaggatcttcaaaagtcttgaaggtttgcgctttcagtccattggtgtctgtattgctcgcgtgggcaacaacctcgcactaatcatcagtcttcgacgacttctcggacttcttcgatctccactacgtgatgcggaaacgaagactaaacccagcatttatccacgaagacatccactagcactggtgcttgcggctattgctctggctacgatcgtatttgttacagaaagcgttcatcgctcgcggtcagcttgcgaaggctacccgacgtgtacaatgtacgcataccgctggcggctttcaagtactacgaagcacccaacagattccggggtcagcacaacggggtggaattgcccgcgccgtgttcttatcgacgtagacctagcgccaactaacttctctgtctggaagaatcctccagacgtatctgacctcgcagcttcgggtgatctggaaatcttacaactaattaatcggcagctaccagatctaccaaatacactacaacaatgcactcacctgaagcacatgtaagttttaaagaatgtgttacatgcgctcgtgtctaacctgtgcgtgttgttggctcagagcgttggtgttcacccacaccagaaatctgcctcaatggacgtccgagttcattcacctggaatttctacatattcagggcaagtcacggagtctaagcctttcagttttacctcaaggacttttcgacaacatggaaaagctgacattcgtccacctaggagcccacgaagtcctaccaaaactccccaacgttggtggtattacgaatcttcggtcaattacgttggcacggctgaatgcactgagctctttacccactgacttcgcacaactggagcacgtcgagatcatgattgcattgatgatgccagaccttgcgagtttcccagacctcacgcgctctcgtcaagctctgaaaactttgatcatcgaccccaatgctatgtgttgcaacgggttcttgcccgcaggttgcaatctgaccagcgatatctgtagccatcgcgaatttgaagacaacccgcaacttcagtgcttgtccgcggagctttcagctagttctgggacgctagaggttttagaggcattcaactcgactatatgcgtcgatcctgggtccccactgcagcctccaggcatccccaagggtaatgtcacgaattctagcaatccaccccctccaaaaatgccaccaccaggaaccgagcacgatcaagatctcgagcaaaacatgctgcaatgcgacggtgttctttatcgcgagtgccaagtggtgccagggtcgctcccaggaatgtgctacagcgatcgattcatgcctatttcatgcatgggcgacccaaacatcatcgaactgcgccgccaacaaattcaactgcatgtcggacccacatgcgatccggagtacgaggagtggctaggctgcacctagtgactgtaacaggtttgtacacatacactgccatttgacaaacttccaaacaaaaacctttgtatgaagtaatacataaagctgccacccttgcactcctgctacactactggcagtgattcctatcaaacccttgtgctggtgacagacgaaaacccgcgctaatcttcatcatggccccactcgcgctaccacgtctccgccccggaccccagactcacttggcggccagcatcttgtcgacacggtctgcaaccctgtcgccaattctgcccagcgccttgagctccttgccgttgttgacagccacgtcggcatctcgcaggcggcgcgctgcccgcaggaacgccgtgcctcggccagtgtggcgcttgtacagttgctcctcgccgtactccaccaaagcgtccaccagcagttggttcttctcgaccttggcactcttgctgcagacgtccatcacaatcggaggcaccaccgagtcgcgctcacgctcgccatactcgctcccttcctcctcctccacttcgccttcgtcatactcgtaatcttcgtcgctgtcagcatgtccttggtcaatgatctggtcgatcttggtagcgatgcgctgccccaccatgtcgatctcctggctcgcttgcttcccggacttgacagccgtcttggagtctcgaatgtgttgagctgcacgcaagtgcgagatgcccttgccccggtgccccgagtacaagtggctgtcgccgtagtcgaccagcgcatcgacaattttctgattgtccgggcagacagcaggcttctcacgcaagtccttcacgatcggagccagcgtataaccaccgccactgtcccgcgagcagcttcggcttccggcagtctcaccggtgtccttcacaatgcgtccgtgcttcaggatctggtcaatcttgtcggcaatcacatcaccgaccagcgggacactcgtacgagccgtcgagcccgacttgatctcttgctctgcgagttgaatctcacgcgcagcgcgcaggtgactcgttcccttgccgggactgccgaagtagagctcgtgctctccgaacttagtcagctcggccaccagcttttcgttctccgagcacttggcttgcgagttgtggatttccaccacaagctgcggccgctggtggtcgtccacgtcggtgctgacgttctggtcgccagtttggtccttcagcttgccggtcacgagcacttcttcgatctgggacgcgatcttgacccccaccatggggacggcgcgcgcgtccttggccgaagtaatcgcgttcgggtgatcgcggatgtggagtgcggcacgcaaatgcgagacgcccttgcccgtgtgccctcggtcgagttgctcctcgccgtacttggcaaacgcgtccacgatcttctggttgtccgggttcttggccttctgctcgcgcacttcttccacgagacgaatggtcttgtgggggggcatggactcctcttcgccgccgccctcaatttcgtcctttgacactgctgcgtacgcatacccagcagtggccggctcgctctcgtcacccccgttctctcctccatgcttgctcttcttgttgctctgactcatttcggagggcagggaacgcttgttccgcccaaacttggctgtgattttcttcatggcagcctgcaaaagacacatcacaacgtgagaacaacgcgtatcaattgaaaaggttgagcaggatactcacgtcttcgtcaccgttagacgaaaggagtgcagtagcgatatcactagtagctgcgtaggcgttctacacaacgacaaatattcgttagatcgataagttctcgtgagtcgctgcaagtgatcaagctaaaccaacctctggaatgtcgacgtgcttgctcttggcgatctcgcgcaacttgccgatttgcgcgtatacagcgtcgccagtctgggcgtcgaccatgatccgctgatctcgctgctcttcccgttgtttccacgaaaaacggagaatggcaggctttgggcggcattcccttctcccgagcatgggacgtaggcgctaaatggatgaggatgccacagttgggcgacaactcgtaagcgacgaggccattcggccaactgagtttcgaagtatactactgcgttgaagctggcctccattgttctccacgggaaattctcagtacgcgaaatgaacacaattgagacgcgggcgagttcaactgccttgaaccagccacaccccgcgtcgagatcgcgtcgatctcgtcatccacgctcgtggacttcagcattaaccggccgcgggttaatgaaggaagtccttccatccagcagatgcagccaaaagtgtacaagctcagctgtggaagaacctcaagtctggtgtgcgttgcgaaagtggacgcatcacggaggagtggggcgagatcggctttcaaggtgagagctttgcggcaatgctttggaaaagcttacgtttttggtttttgcgttataggcgccgatacgatggtggacatttgccgtgacgggcatgaacgtgatggccttctgatcgagctgattgacgagcgtctgttggacatcaagttgtaccgccatggtgcggggggagtgacgaccacaacgtgaacgtcggactcgaggagctccacgatgtctatagagacttttagtaagctatcgcttgtaccattctacagtagctgctcgccagagaaagattcattagcggtaatctcatatgctgcttgtccttgatgaggcaaatgcgttccattcgtttattaggactgcgtatttgcaagaaagcagcgcagacactacaaggtttgcttccctcggttgatcgtcgttgcctacgactacgctagaatcacgtcgtactattgtatcagtacgctatggatgctttggtcacggaggctttgagtttcatatacgctgaacgaagcttcctccgtagtcgagaccaggacacacgtccttctcacgcgcttcggtcgggatgggcttcttgccgacgacaaaccagactggtacactctcaccagtatctgaagaagacaacggtgtcgacttgcgaccaaaatggaccccttcctccccaagcgaggcttgcaacttcaagcaccaggggatctcgcgcagaacaccgtgcagtgggtcgtcttccgcgtacttcattgtgacatcaccgaagccctcgacagcaaaggttgcgtgaccagcaatatccgcccaaagctcgctgccaggtgcagatagagcatcgaccgtatccagcatcgtggtaatactcgatcgatccatgtgagggagcaacccttccatgacccaaaacgtaggcaagcttgagtcgaatccatgagcgagcagcttgtggtcccagtcatcatcggcgaggttggcaacgatgcagtcaagctttcgtgccatcagcggcgcgtcttgcaatacttcggctttatgatcaaacgcctgggagttttgctcaatttccagaacatggcattcacgtagagacaacaagcgatacgcgcgagtgtccaaaccagccccgaggatcacaacttgcttggtgccgctgccgcggtgctccagtgcgtcatcgacgtatcgagagcgaatcgcaatcagattctcccaccgaacgccctgctcagccgtccccttcaggaatttctccagctcgttgcggttccgctgcgtgagaaggccagcaaacggatcgttgtacacacaatcatcgcgagcactctcgatagcgcgcatgtacgccgttccaaacccggtgagctcggtgaatgagttggcggcagtgcagctgacgttcatgttgcttctgcgaattccgagagtgtgcacttgagttttgatgattccgatgagattatgtgtgaaaggaattcaacggcaatgacctcgtcgcaagggaaaagctccctctctcagtacctccaggcacaaagcaatttgacacccagcaaagaaaccatgaaggacaacgagttcacccgaatctaccagcatctcggcaatttgcgtgaggcgtgcaagcggaacggagttgctctaccagaggcagatttcactgctgttgtttctcaatttagttcatatataacccactcggcctctaacgctgtgtgtgtagaacgtctacgctgcttccaccgagatgtcgtcggcgctagccgcctcagatggtgacgaagtggtaaggaatcccatcacactcaaattatgaagtgttgattgctaacgagacgtgcgttcaccaggccgctttgaacttgctgaccgccaaattcaaacgagggagcaaacgggggaattcggcggcggataccacagcggaaaagagacgacgaaccgaaggcaaggataccacggcaccgggacaagatgttggcagtgaagaagagacccctctggacatggaagaagatgaagcagacgacgaaagcggtgagttcgagcaggaaggagaaaacggagacagctcgccgcagaaattgtcgcggttgtccgaagatgtccgcaagaagcctgctgcagtcgcgtcgaatcaagttattgtggacgccttcacggcctatggtgatcaacagctacatcgaggccacacgggcaagggggtcacgcacctacgagctgcacttgccattcgagactaccctcatgccattacttcgggcgctgaagctcgcgctgtgccaatggtaggggtcaagatggccaagcaagtggaggaaatcttgtcgtccggcgaactcaaggacgaaacaccgtggctgaacgttagcaccgcagacgtggagcagcactcgcctcccagattggtgcgggaggtgcgtgattcgcaggcgaagtgcccagagaaccaagcgctagtggacgagttggccaagttcggggagcacgagctgtattttcgtagtggcagtaaggggacgactcaccttcgcgctgccagagcgctccagctaaccgaccaggttgtcacgtctggagaccaagctcgccgcacggtgcccctcgtcggacgaactattgctgacaagatcgatcaaattctcaagcacgggcgcattgtcaacgacagtccagtgtcgagcggcgttcaaccagctccgatcgtggtggaccttcgagagaacccggcagttcgacctgagaaccagcgcattgttgacgctctggttgactatggcgacagtcaccttcattccggccaccggggcaaaggaataacccacttacgagcagctcgagccatccgcgacgccgatgtggtggtgacgtgcggtaaggacgcggtcgagtcgatcaagcaagttggggctcgagttggtgaaacgatcgaccggcttttggagcagggcaacgctgatactgacgaggatgaggatgtcagtcaaactgatgaaggcagcgagtatggggctcgagagccttcagacacgccgccgattgtgctcgaagtgcgcagcaaaccagctcaagttgaggggaaccaggagattgtggacgcgttgtctgtgcatggagagaaacagcttttgagatggcacaccagtcaaggaacggcgtttatgcgtgcagctcgtcgcctccgtgatgctgcggaattggtgactaccggaagtgtggctaaagctctgggttgtattggagataaggtcgtcacgtttatcgacactgtggtcgtgtgcaagacaatggaggaggtcgaggtcacgacgggctcggatgaaggagaactgcagtagtgacaagatgtagctgcccgggtcacactgatattgattttagtttgcatgtacggactgaggagttgtaacgcattaaaacagtggagatgcaatggacacgagcactcgtttggtgcattcacggccttagctgcgttgtaacaacttcgccggaccacacactttgtcacacgtcacacatcgtgtggtgcacataaaacaaccgaaatgggtacagcaaaaataggtaccggcaaaataggcaaaaatatataatataccccgcgaaaacttaccggtaatataagttcccgccaaaacctttgaacacttttggcgctctcgcgagtgcgcactcgagcgagcgagcaagttcaacatggaggaagccgacttcgtagccgactcggacgaggacgagcaggagctgctggagcaggtggcgctcgcggaggagcagcacacgcgtgagcgcctcgaggcggcggctgcagctgctgcggcggccaaaagcaaaagggaactcgagccgaagcgagcgcctgcggcggttgtgacgccagagaagccgcccacagttcaagagcagccgaaacaagcccaagacgaagctggagccaaagacgaagaggagaaagagcacgtagttgaagagcaagacgaggaagaggaagtgactgacgaggacgaggaagatgacgaggaagaagaagagcagctggatgagaacgctatccttgaggtcaggacggtggtgacggtggactcgcgcacgtggccgggcatcaacaagctcggaggctctggtcacgtcgtccgagtccacagagaacctgcagaggacggagtatccgaaaacattttctacgacgtccgctacgtcctggggggcttcgagaagcacatcgagagcaagtacgtgcactcgtccaagatcttagagcagcagtcgacccgcaaaagtgtgcgcagagatttttaccacggtaagttgacggaggtgtgccctttggtgtggtctgcgtcggatactcattcgccttttttgaatgcggttctcttttctttctgcagatgattacatcaataagccacacgagaagaagcaacgagatgcagagagaaagcgcgaaatagcgttggctcaccctgaacgatcggaggctcatgctccgcttcgcaagaagcggaagcgctctcaccgcgcagagcacgccgaacgggtgcccagtgacccacaggatgaagagtcgaatagtgatgatgaaagagacacgaggcgcaaagtggccaaaatcgacgaagacgcgttcatattctcggagacgaaggagccgtcgccatcgctcgaggactctagtcgaccacccagcgacagtgaaaatttgcctgggattcagagccccccgctgagaaagccaagggggacccaaagacgatggcaccgcatactggacagtgacgatgaaagcggcgaggaaagcgacaaaagcaacaggaagagtgttagccctgaacgcgcgcatcgtgagaacctacatcccagtgtatcgccctccagggataatgctgtgagaaacactgaagaacagaaaccagcacgccgccatcatccgcagaaacgaaagcgcacgacacgccgacaacgatatgtcgggggatatgaacacaatagacaagctctcgatgaccctgacgccgtttttatccaaccggaaggaaacccgaccgacctccccgaggatgtcatccgaaaaactgggatcaagttggcgaaatcgaaggacgggctgatgaaacaacttcaggaagtatttgctcaacagcagaaacacctggacaacttccacggcgagcaaaagatggtaaaccagaaattcaaaaacctggcagatatgacgtcggtcgatctacaagggctccataggaaggtgagattcgcgatctttgaacattgacgggtattgtaacactgacaaagctgttgtgctgaggaaaggtgtgcgagctagaagatttcgtgacacggacgttggtcaatgctggcgaagatgtgatgaacaagattattgaaaagcttgagaagcgtggtaaaccggtgagtggtgcaactgaatgcgtgtcatcgtgttctgtagatttaacaggtgtttgtttgccagccttctgctcttgaatcgttagtgacccaaattgatgaatggctgatcaagatgaacgagtgttctccgtgggtacggaatagcaaaaatgccgttgaaaatgcgtttggaaggcgcagcgaagaaattccggcacacaagtcagtccgggctgtatactcgtctgacagtggcgattccgactattccgctgatgactttgatggaacggttcttgggaacaaggcaacaagaactgttgaccctgttttcgatgagcttgatttatcgtacgagtacgaacctgcaagaaacgacttagtgactcgtccagatggcaactcgaagcgtcagtccaatgcaactaaacgactgccaagtagtactacgaagactgtgaagaagcagctgaagaagaaagtggtgacaagcacaacattagacgactactactctcaaggatctggaggcggattcaggtcgaatctccgactcatcggtaagcaaaagaatattctcccgtctgatcctcgttggaactgggccaaaattgcgcgcaagaagcagcaacgtgctggaggaggtactagagaacgctggggtggtatgtcgtcgtcgcagcttttcatcggtgtgagcagcagacgcgaaatccatgaaccacgcccaagccgacgcgatgatagcgcgtccgtgcaaatagagcgactgcaccttcgtgatagcagattccgtcgttcgaagtcgacccagcaaggatcacgtgaaccagtatttgctcgacctcccccacacgttgcgcgggctacgatgctgattcccgatggtataccgtttgacgacgttgccccagcgaaaagcaaaaagtcagtgaacttcttcagcccaatgatatcctcaggtgccgtaaaggagccatcagtgaattggaaggcaatttttaaggtggtgtcagatagcactggctcaatcgctactggaggcaactttgctgctataacacgtcagcaacaagacacactcttgtcgttcggtcacccgatttgtgacccactggttccacgtcatttgctctgtgacgaggacttcgacttcgaagactcagctatgcttcgcagtgttgtgcagagacgttcaactcgtcttcgtcagctaatgaacgaccttcgggtggaagaaaatgggtttatggagtcactctctaggggaagtttgggtgccattgatgaagaagggtatgcaaccgcccccgagtggatttctctggtttcgcttgaagaaaggtacaacactgctatctcaagtttttcggcgcaagttttacaggctttggaagcagcttctccatcagcactggcaagccatctcgagatcatattggaggaagtctctgcgcttatccggcagctaccggactgcgaatcattatttggcgggtgcaaagcctatttctttttctttgaggtggcctcccgagatgcagcgactactccgctcttgacagcgatctcacgagcgtattggtattgtctcaatctactctcggctgtccgatctgcttgctcttcaaaagtggcatctcaggctgtagccaaacaggagatcgacgatttgtttttcaagaagttgccggtgaacagagtcacactcgctgtggtgcttttcttgttcgacctgtacctctatctccctacttctcaccatctggatgatgcggtaaattccagtggcgcactacctgcactctcgttgtggttgttagttcgtgagtgcaccatgagctctgctcaggcccaagaagattcgcgaattagcaaggagaaggatttttgggcattactacaagctgtctaccagcagcgttatttcgacgagctagctcgttgcttcgtacgaaatgaatcgtgtggagggtacctgcgcgattttacaccaaaggtttcgaatggcgacggtattgaacaccgtgaagagatactggaaagccagctattagcggctgagtcgatgtgggacctacttgcggtactcacgcgagtatatgcggacgaagaaaataaggagggcggagaggctatgtaagttgtcagctctgtgcaatttgccaggctgtaaacttatcctttattttttgggggttttggtgatgtacgacagatctgatgctagatgggctgttgttaaggacctccttcacccagacaagcgcaactttcttccgttcgacctgtcaatttacacgcctggaaatttgctgccagactatgttacgcggccaagtaagtttagtttgctgctgaaaaagtttgctggggtgctaattgtgatgtattggtatagatttttatatgcatcatgtgctgaagcgaattgcagcattttccaagttgtggcacccttccaaaggttggtcaaatttaagtgttggtctaagtgttgttgcagccttccattctaatgttgtgcagatattgttgagattgttgtaaagcagttgtgggaaagcgacgtatcgaacgacccagaagaagccgcggagctccccaacctcctgaaacggtttgctattcattgcagggggattgggaactcaaagtcgcaactgacagcattcgctgaaagttgctgcggtgatgatgaaccagatttcatcgcaatgttgtgcgaaatcatctgggtaagtgcggatctgaatgtgttacttggacgagtatatactaatgcgttattcatgcagactcaactgctcaagcttgataaacgggttcatcgtgctcgcttccgccaatccattatacgctccatccctgcttcctccgaaacgaatagttcagcaatttccccatcggtgatctcaaagccgtccggaacagactggaattggggacctaaaagggcaccaactgctactcagcaggcggaagctcaatcaggggctgaattacagcaagattcgccaagtgcaaaatcgagaaaggttcgttttccaccacggaaactcagttttacacttcaggaaaggtctgctaacgaataccgtggttttgatttcgttgcaggagcgaacacgcatcgccgtactcctaacttttgccgtcgttggcgtatgtttggagtgcggagatgaacaacggtttcctagcaatcgaaatgaaaaggacctgcggtacatggagcgggaaatcgattattattgcgtggaaattcttcgagggacgtcaggaagactgcattccgaagtgattgtagcccaggcactctatatcctcggggccctgctcttggaaaggaattccaccgagtttcctcttatattccgaggcctcaatggaaggttggatgcgtctgtgaaaaatctacacgatagcctctctgcgattccgacaccgtcagagatggcgggtaccagagtcaatgcgagcaagaagcgcagtttagaaaggcgtcgtcggcaaattcaaagtaagatctatgaggtggattgcaattcggtgtggctgtataactgatgatatggtgctaatttttgtacaggtatagcgatgtcttcagtttatctgatgcgtgacttggtccgaaaaatgattacgatgccctcatcaggtgttggagttggacaagcttacggacctgctgtggaaaagagtctggagtacattttcagcactggaatggaagcatgcttgaatggcgttattcagaaggtcgtcccagtcaaagacttgaagattgcgatggagatatttcagcttgtactgccacgagcacaagacaagccacagcaatgcctggcgttgattgaaacgccccaaagtgagtttgatatttttgacgacgatttggcaacatttgacctggaggcagcgattactgggcaccaacgtgcacctgcctcagtgtggacagcttccgactgcagacctaaagtgattcagcttattacgaacaatttgcgagtggcagttcagcaacttgtgcttaactacccacagagtgatgccccagcgtttgatgaactctacgcgattgacttgctgggcatggttatttcaacgtgtgaagttcaattcttttggagcaacgttacgtctgcgtcggcgaagcctcgaaatcttgcaccgcgtgttctaagcgccgctttgaagtacaaccccgaaaaggaatggcttggaaatgcattcttgagagaaagtggatctgaccacgaactcgcgtcttcatggcttctgggaaccttggatgtggctacattaaactcaacaccgattgcttgcaaggttgaggatacacctttttcgcttgcaagtaaacaacggtcagagggacaagaagatgatttggaagtgaagcctcatgtgcgggattcagattcgtggatgatgttgacggatggaattatttatcacatgctccgtaaagatcctgttggcatttgcactatggatccgcaaatcttgagtcttctgcgtgaagtagcatcctcatgcaagttcccgaccgccgttcatgccagcacaaatggacttcatgatgttgaaacattgtacgacctacatctggatgtgtttcagtcgttttccagaagcgctggcaaacagtggagctcattgggagatttgcgcgaaaagaaccagtttcgtaccaaactgatgagcaatcagttcggaatcttcatctccttcctagagtaagtcctgctcttgtctgacagcttctgcattgcatttattctgactatttatcctgcaaacgtgttgttgtgtgtttaatttagcgcgttcaagattaactttcggcgagcctgtaccgagattgacagagtgaatcacaattggcatgctttttccgagttgtttcttcgccaggctggagtcaacgccaccggaggacgctcgtatcatgagatggatgacacgatcaagtcatttgacgaaagacttacggggttgactacgatgttccggttcatgtaccagtgcatggatgcttttatgttctactgtggtgagatggcaattgggaaatccaatctgttttttgatgctatgcaactgctatttcggcaagtaaacagcgccgagtacccacaagcagaaaagcggatgaacggtgtacgtacattggaccagcagagtggggtgcgaaacgtgaatgaagagctccgaaaagggttctgtaccggctccatgggctttgtcgatagcgttcaactgttctttgcgcgtcagaagtacccgagtttgctccactggtttgctcaggtacgcaacatttgctaggtgtagtgatgacaattgtggttcgcaaactgattgtgtcgtattgtagacgtccgagatataccagacttttaacagcgggtgggaggcgtctcctctaaaaacattgctggtgaatatcttggacccggatggacctcttggaattcacagctactaccctggtgtcgaatcttctaacgagcaagacatcgacgtgaggacagttcgtcgcgaagcattttacctgtcgtgtggtcttttcgactgcagatgcacaaattcgttcgagcactcgcgagctacctcctcctgttcacgcgttcaccaacttcggcagtttgtactgggtgattttatgagggacacatttactttcgtgcaacgagatggagatacatctttattggagacgatggtacctctgtttcagtttgtacgggcggtgctcaaccacgcaaacttgaacgcaaactcgcatacccaaaccgcaacaaacaatgtgcccctccaagagtttcaactgaatgagctgcatccgtgtctggaatggatggtggaatgtctgattaagtatgtacctggcgaagaagtggtcaacagcacaatcaggttcgtgctatcgcttaaaggctttacaaaaacaaactagcgactaattcttgtttttgctgtggaaacagctgcgttttgttgaccgagttatgcggaatcgtgtgcgaagcgattgcattcaacgaacaccgaccgaagctggagctgatcgacttggttgagctcgtactagtgtatctgcaatctgtctacgttgcactctccagacgaacaacgactatgatgagcccattcttcgccccctgtatcgagtacccgccgtcagtgaaactaagcgagtatcgtttctccccatcgactttccgtgacattgtggtggaacgtggtccaagtggaccggtggattcgtatgagatcagtttggcacgagctgcgacggatcttttagctgctattgggcgtgtcgctcagcagtgccaggcatcatccgatgatcgacttcgatacttcacgacggtagcaccttgatcaacattatgttgtgaaaggatgttgggagaatatacgtggtttttcttgagaagaccgagcacgtagcgcaccgtctggttttctctgcagtcggacccatcggcctggcagctataagcgtggcaggcatccagccaacgtgatcgcaaagacggaaggcggtgatgaagacgatgctgaccatagacgctcgacgcatgcgttgggacttagattgttttcgcgtggaggtccgggatgatgatagcggccccgtacgctacagccaagctggtcgtgcaccgactcatcaatggttcgggatcgatgcatggtcacgcatgttccacggcagaatggcaaccgcgatgatatcagtgacggtagtgaccaagcaggccacgcttcggttggaagcttgtggcgataaggacgtgtgcctggttaggactgcttcgattaacatgcatctgcaggtttgctacacttattaatccgataaccaccaagatgcaccacaatgccaacaatttttactgcagtcttgttgatgatctagaaattcatagatgaagtgtcgaacaagcagcagtccttccctgaatgacctggatgaagccctgtagcgaacgacggatcccttaaatatctcgctggactagaagctcgcaagtattgccttgaatcgctccatggctgtcacattctgcaagtcgatcaaagcggtgggaatgttcgcgcacaaggctgactgacagtgctaactgcatcatgactagtcagccattgatggagccgttacctccatgtcgcctcttcccgaattccatgctaattgcgccgaggtcggatcgttcgagtatgcggcagtagcatgcgctccttcttctccaagcgcaatgccggcacccagtcacgcaagcgcaagcaggtcgagaacgatgtctctgccgacggagtcccaatggtcttcaaaggtgacgaaagtctcgttcagctacacgcggagacagctgagctgctgcgcctcgtcaagacgcaaccaaagtcgtcgaagaagagctccaagctcaacaccagcgccggggacaaaactcggttaaccatcgaagtactggacgacagcgaagacgatgaacaagagtctcaaactgacaccaaagctgctgacagtcaagctgccaagtcgccccatcaagagtgggtagagccacctgcacccgttgatccatcggcgtttgacgcggaagagactcgaattcgacagggcaaagacactttctacccggacataaggccgtcgaaacacggggtcgagtggcagaagaacgccttccaacgagagcagaatcgccaggaggacatccacaacagcgagcgttcgagggccgagcaagcgattcgcaagaagcagcggaaacgtgagcaaactctggagaatcgactcgagaccagcgccaccttgatccaagcgcattccagggggttcttgtgtcgtcgacgaaggtgggaagaaaagcaagctgctgctactgccacaacagctgctaccgtcccagcagatgaggttgagactgaccgtccagttgatcagtggcacgaagtgcgcgacgtcgagcgtggagaggtctggtactataacgccaccacgggagtgagtcaatgggaacctccggcaactttcactccagctgctacaccacgaagtcgctcacttccagaactcccagccttaaacacgagcggcagtgtgaagacagcgacgtcacggacaaaccagcagcggtcttcgtcgacaatagaatcactgccgcctctatcacctgcgtcttcctcagctcgctcaacgtccagttatcagcaggagcagcaacaccagcaatcaggtgctcaccggtcaagtgaagcaagcatgaacaggaaatccatccggtcaccgcgaagcctgccgtcactgcaacctgagggcatcacgtcgtcgccgaatccatgggagtgtgactcggtgctcccatcggagcgcagtctttcaaccgatcggactcaagactctggtggctacgcggacagcgaggttggcgactcgttctttgagcgccggcagtcacttccgcttgagctcgaagactgtggccaggaccggatcgcgccgttagaagatgccaacagcgactggcagaccaacgacacgctcttccgcgctgacggcaccaagaacagcaagctgcgagacacgatccgcagcgccttgcacgtgtccaagttcgactcgatctcgtcgcttatcgcgtccaacgtcgttctgcgtcggaaatctgtgccagggaaggtctcacgcaaccagaacccaggtagccgacgccgcgagattgtgttgggcaagcgcgaggaaccggtgtttgtcgctgtcctagcccgtgatcgggacaagcgatcggagcgctcaagagccgatgaggggaatcctgaatcgcccacacgggcttccagcatccgcagcaaagctaaaacagcgagtcgagcagggagacctccacacatccgcgacttggcagaccctggtttccacgaagacacatcgcgtaaaagtccaacgtctaggtccaggaggaaaacatcgcagcaagagaatgaagacgatgcggatgatcctgaggcgaaagaggcagctcggcgggaagctgtcacagtgtgtttcaactgttggagtgccagcaatggacgtcactgcgacttgcatcaagatccgagagactcgacgagaaaaattcgcgctacggagagcgcactcatgtgcgccaactgggagctggaccaactgcgtcggaagtaccgagcggaggagatccaggaaatcttcatgaagcagcgcgcttctctccgctacgatcgcaagctcaagcagtacgtcacagtcatcgagtgtcggcatcccatctaccgcgctttggagcagctctcctccgcttggaacaagacgatgcgacgcaagctccacacacgctcctggttccgctcgtttctcgagcagattcgaaccgatcgcttgccgagaactcttggaggaggcaaggaaaccagtcgaccaccgtcgctcttcaagctgaaaaacacgcttcaaaacgctcggtgggtttccaagtactcggagagcgtctgcgagttccacccgaaagctccagtgacttccaaggaccgcaccggtcaacacccagttcctcttcgcgatgtcatcatgattaatccagctcgtccgcaactccgtaactggatcctcgtgacagagtacaccaaaccggtagcgttatacaagcctcgagtctatgagctaccacctcctcgctgcgtgcccatgcccgtacccagcttcttggagcgactgccgctgcctgtttcaaacgtccacattgatgctggccacagcgcgagttggctcgagagactatcagcacgtatggccatctcggccgtgcagaaggcagcgctgcagatcggagcgtgcagcccaccacatggctcaaccgatgcaaggcgaacgaaacacgttagaccgctcgtcgtgctcttcgcgaccttctcgcgcaagccgacgccaggcaacttggacgtgggtggactgtccgctgtgctgctgatccacatgctggtgaccacgtacatccctgctcaattcggcaacttcgtagtgttcgaccgacgcgcagtagctccagcaccttcacgcgatgagacggcttcattcgtctgcttgattgtcgacccaaccacgcccgaatatgtcttccgtgcgctcgagcacgctctcaacgtacgaagaccgccgtgcattgtcgtagccgctcgagttcatctcgtctcgtccacagacaacgaagacaccagacgcgagatgatgctactggacgcgcggaggttccctttgaatcgccccgagcaaaccggtgaagaggaggccaatggattccggacctattggctcattgatccattcgcagtacttgacttcgtccctggagtgcaagtcgctccgtcgagcggcatcctggtaccaaacatggcgtcgctcaacgctacagtgaccacgcgggtggatcgaacgtacccgttctgtgtgcctaccacgcgggagaacacgccagtggagttcattcatctgctctggatcggccagtcaagtcgaaaccagccccaggccttcacgacgctgggtagacagcagccaggtgactttatgaagaactcgaaccccgatggcgcccttggactttgctcgagtgtcgtctaccgcagctgggcgtacatgcagaacagcccgtacgacgagtttgtcaccgaggacggcgtggcgtattggtacgaccgtaacaccggcgacacattttggacgcgacctattctgcccacggagaagtttcgcggcaaagacggcgaaatcgacggtgttattaccacaggagaaggtgaaatcgccactcttggcgtcggtcttggtactggtgcggcagacagtgatgctgcgaaagacggtggagctgcgaggtactcgcagcagaatcttcggaagtacatgaccaagaaactcgaggccccggaagataaggagcgccgtgtgaagcttgtgacggccagcgccaagaagcacgacatcgtggtggacctcatgtctggtagtccttctggtccagcatcagtcagcaagggagatctcacgcgaattcaagtcccccaactttacttgaagcgacagccgcagcgaagtagcatcgccggtagtagagcgtcatcggcgagttcaacgaagtcgcgagtgcagattgccggggtggcgacaaatgagaccgtagaatctgatggagctgtcgtaccgcctcttgattccaccacaaagcagatgatcgacagcatcacactggcattgggctcagctcttccggccgcaaagggtgctagtgtcgacatgttgcagcttggcatcggtcttggcatgggcctcggcatgcgcgttcaacagcaaagcacctctccgatacgccaaggtgcaccgaccaagtcggagctggctcgaaaactccaatcaagcagcagtactcatgacttcgacgagcaggatggagaggatgacgaggacgacgaaggtgacgaactcccgacttcttctcgatcgcagaccagctcggttggtacgtccctgctttcttcgaggagtgggtactccgtggctccgtcggtggatatctcgccaactccagacgatgtcgagctcagcgggggcggaccgcatgtagggaaaaagactccggggtatcagacacatcctccgccaggagagggcacgtcttgggtccgaaagcctgtggacacctctggtgacagccaaaccgcagtggaaggcttcggtggagcgttgcatcagcgagttgcttgtcttccgaaggacttcatcgctgcagtaaccagcaccaagacttgcaaaatgcaggccaactacttgccagtcatcaagaacatgaaccagccgagaagtgtcggaattgttaggcctcgtggtgcacttgaggaatggctggtagtcgggtactcgccttggacagcaggccgcgcgatattcgggacgcagttcatcgaagacctcatgcttcgtccagaactcgtccagactgccacagataccgcaacaccagcaggtgcggcagctacgaagcccgcggtcgtgcaggtggagaaacgcgacaacgtatcccaggcagtcaaggaggcagagcagcttgataacatcttcagtctctgtcgccacggcaaatacgacgaggtcgagctgctgctcaatagtccggactggtcgaccggcatcgacgcgaaagacgccactggcaatacactgctctcggtcgcgtgccagaacaacaacaagcgcattgcgaagctctgtctgcggcgcggtgccgacatcaacacacagaacctgaatggccagtcgctgttgcactactgccatgagtacggattccacgacctcatggagtacctgatggaaaagggtgccagggacgatctgctgaatgccgatgggctcacgtgctacgagggtctcactcaggaggctgttgatgccatctagagcagaaacaaataggttaatagagtagtcgttttctcgcgagtaaacgcaccgttgaattgagtggcgacgaatatcttcagacggcgattcgcacctcactcatgaagactggactggtctactcactgtccccgcctcgtgtatttaactgttaaaataatgcagcatatgcaggataaccgagaatcccacatagaagcagaagatcatgaagccgtagcctttgccgatcttctgcgtttgctccagaatgcggttgctctgagcattggacatgacgccacagtacagtatattagttgcctaggcgtcactgtggccagattttgcatataaaatctcacctgagtgacgttcgacttcgtctcttgagcgtgttgctggataagctcaatatcgttttgctgctccatgattttgtccgcaaattggcccatgaggttcgaaatctcggccattttcgactccattttcctgtagacaagtacagacaacacacgattagtaaaaacacgtactcagatcacatatgcacagcaacagcgtacttggcgtcctctaggttttcttggaagtggcgatgaagcatgacgttctcgacacggaagcgacggtcttcctcttccgtgaattcaagcgcatccttctgtgaagcaaacaccgatgcctgctgatgagagtggacgaacgcatcaaacttagaagttagttcaatatccacaacgatatgatattatagtagcgcccacctgtggttttggcactgatttccgcgctttggagttattgcgctgacggacttccggtttcgcttgcttcaccggagacgatacagcgagcggcgaagctggtccattcgtggacggcgactttggtgatcgtggcgacaaaagcgccggaacttcaggatttttcggagagctgacagtaagttgcttcttcttggcttccacttccctcatccgcacaattttctgctccagtgcatccagctcctgtctgtcgtcctctggcagcaacctttcaccccaccaatataaagtaagtttgtcatggcaaaactttggacaagaagaacaacgctcaccgtgacgatagcaggaacggctgctggtacctcttcttctgcatctgcttcgctccatccgcaatagttttcaaacgctacgaaaaaaaatggtgtcagctagctccttcacttcactcacccaccgccaagcactatacctccagcaagtaggccaccacctctctctggtactcccccacactggaaactacagctgtatacacgaaaaataacgtcaagatcgtccgcagcccaataagagactgctttaactaaaaagactcaccctgtgcctccaccgccgtcttgagatcgtcgattttgctgctgcagttcttgatgagctccaccaggtccttcaagtcaccagcaacagagtcagcattaccctgtccgtatatgattgtcacccttatcaaaactcactgcgtccagctcgtccttgtccgcctcgctcatgcgggaccctttggtccggacaaagcgcttgggcagcagatacttgggcttcacgcgctgcagcagcttctccagctccactaggctgcttaactgtatgataggaggataataaggataataacagtaacaattagcatatccataatagaaaaagtgaattttaggatctaaacgagcgatttaacgcggaattctgatgtctacagacgcaccagctccgcagcttccacgtagaagacgctaggtcggctgggggcagcgtgggtcgtcgctggggccagctcccggaagcgcgaggtcacgtcgacccgcatcttgatcgcttacgtggcgaaagtgtagcaaatgacatggattggctaaaacgttttcattgtttaagccaatcatattgttttatttggaagatggctacaatatgtaagttgaagatgacatcccacctcgctacgtggtttacctctttctatccaaatttggaacggcgtacatgcgtgctatcttgatggctgtatgtacaacgatccgtttgctggtctcctcacgcagaagaaccgccacgagctggaaagtttcctgaaggggacggctgagcagggcgtccgatgggagaatctgatcgcgattcgctctcgatacgtcgatgacgcactggagcaccgcggcagcggcaccaagcaagttgtgatcctcggggctggtttggacactcgcgcgtatcgcttgttgtcactgcgtgcatgccatgttttggaaattgagcgaaatccccgggcatttgatcataaagccgaagtattgcaagacgcgccgctgatggcacgaaagcttgactgcatcgttgccaacctcgccgatgatgactgggaccacaagctgctcgctcatggattcgactcaagcttgcctacattttgggcggatatcgctggccacgcaacctttgctgtcgagggctttggtgaagttacgatgaagcacggcgaagacgacccactacgtggtgtgctgcgcgagatcccctggtgtttgcagctgcaagcttcgcttggggaggaaggggttcattttggtcgcaagtggtcaccgttgtcttcttcggataccggcgagagcgttccagtttggtttgtcgtcggcaagaagcccattccgaccgaagcgtgtaagaaggacgtgtgctctggtttggactgctgaacatgctgagctgaagcgctgttcagcgtgtatgcataggcttgctagcagataacaattaatctagcattcccttgcagtcttttggcaccttcgcccgacgaatcaacagccatcacgttggctgctcgcagaaaaaatgtgggaaaatgcagtgggggaatctttggtttctccaagcctcacaacagattttgcttgctcgagcgtaggccaagcaacaccaccgatggatccagctgtgccgtcttcgctgttccaagtggacgctgcatcggtagatgatgctttcactgagtccatgggcttcgtgacgacctaccttcgagcggtggaaagtgctcgcaacgattcgatcatcaacgacccatttgccgagccgcttacgcggaagcatcagccgaagatcgagaaattcctcaaagaagtgtcgaacaagctgcagtcgttccccgacgacttcatcgcgttccgtacgcgttacctggacgaagctctctatcaccgcgatccacggatccttcaagttgtgattctcggggctgggttggatgctcgcgcgtatcgcctggagtctctccgaggctgccacgtcctggaagtcgaccaaagcggtgaattgttcgagcacaaggctgaagtgatgaaggagctacacgcgccgctgatggcccaaagcgtcgactgcatcgtctcgaatctagccgaggcgggtctggagacgaacctgatggggcacgggttcaatccaaccttgccaacgttctgggttatggagggattgatcccctacatcgaccgagctggcgtcgtcgaactgttgaaagccatcgactacttgtcggcccctggtagcgagttctgggcggacatcgccggtcgaattctcgtcgacggtgacgagtggggggaacgggcgatgaagtacggcgaggacgacccgctgcacggagtgtttagcgagattccgtgggagttggagatgcaggtgtccctgaaaacttcgggtgagcattttggtcgtcactggaagccggtgctcgcacgcaagagcaagcaggctgttccgttcttcttcatcgtcggcaagaagccaatccccgctgcggtggtggagcagaagatgaagcacggcctcgactttgaagactagctcgtcttggaagcgctttcatttggtaactctttcaatcaacgcttttcttgttagcctcccaacactcttaaagccttacgcctttagagatataatacttaaagttttaagtatctgtgccttcgtccgaaagggactgatccatgtgactaccgatttggagttgtattatcactcttcgaaaggcgaaaccccccccaaaagtggatgctcgtaatacgatacgatggcaaagcggcggaagcaggggctacgagcgtctgcgtatcaatcggagcctgtcgtggttcgtgggtgggagtgggcccatgccgcgctctggaatgaaagcaagaaatgtaaagtgcgaatgaccgacaccattgtattccaccgggacgctgataggggcgacatcgactcgttcttgtggctcttcacggggaaaagcggcgcgatttcacgtaaacgcatgaccaaggatggatcactgcccgtaggtaaaatccgcgacagattcttgcagctagctggacgatcaagcgaaaagaggataaagtgggtcgcagtcgtgaattttctcgatggctcacgaaagttggtggatactgaggagtttgaagagattctacaagctcttgatggtggaaggcggggctcgtcttcgttgataaagaaaattgagggactccaagcttacattccacctagcggagatccagatagtcattttcaggccgaggttgaagcttcgagcgatggcggatctactttacctgacgttaaaattgagcgatgggcaggttatctggacgagaggttgaaaggttcgaatgctcaagtttcactcccgctatcgacaggcgtcaataaagatgtggagactgcggcagccactgtagtaagctttctatccaggacaggcgacgcccaagtcgttgcggctacgctggagtttgtctgcgatggaaaccagacggtttggttgacgcacattgggcatgtggagctgcaaacgattagcaacggagatgcgattggatcatcgacgttgaagaagaaatccgcacttccagacctacagacggccactggtgctaaagaagatagctgcgctgctaaatgtcgcggtgaattttgtaagacttctttagcatcactcccggggctgatgaggttgctaaatgcattgcggatacaagacactgcgagttatagcaacaatctcgacggcgtcgatgacccggattttgctgtgttagaagatactggacagcggttcaagatgggcaacaacaacctactgcttgctcacgcagagctcaatcttctgcaagagtcttcttcacagctagacgaagctgctttgggcttgaaatggcaagaagctgacaacgtcttccgcatggagcttggtcgctctaatcctacgcagttctacaaacaggttctggtgtgtgcaaactgccgtcgagtctactcgaccatcaacaaagttcgagacatgggctttcaaggacagaacaagtccgtggaggctggctccagaccaaacgatgagctcgaaaaggctgcacaagatgctagtgatccctacgacagaatgttcctcgaggaactagcaaaacaatccgccgtgatcgatagtaacaagcgaagttcaaacggacccgagctcgatgacacctcggagcgacctacaagcgggtcgagcacttcacgggagcgctctgtactaccttctctacaagtatcccatccagatttgaagcagaagaagaaatctggccacaatacccacggatctgtcatcagcgatgctagaagcaaccagcagtcgacagccaattccccccctcaacttccaattgacagtggacaattagctgataaggtgatcactttggaagctgagttagctcaaacaaagcagaaattggcaggagtcgaagcgcacagaaacaaactcgaacaggagattctacagacccgaacgcaatgcacagccatgctccgagagaaagacgatcaagcgcggaagcagctactcgagctggagtacagtttccactcgaagcagagcaaggtgaagcaaagcagcagcagctcagcggaagaaatcacccggctcatcgagaccatcgactcgctcaacctccagctggaccaggtaattcgagacaaggagcaagccaagaaacaactcgtgcagacgcaacaagcagagctcaagaagttgcatgagaagtatcagctggacatggagacgctgcgtcttagcgaacactcggcgaaggagaagagcgagagcttgcagatgcaaatgctgactctccagagtcaagcgcaagtcgctgccactcaagcgaaaaatgccaaggccgcgctcgaagacttgaccaagaacaaagtcgtcgtgctcgaagagaagaaccagcgtcttgagcgccaagttgcagcgttgaaggtccagcaacggaaccaaggacactcgatcaatatggtcgcgtcggctgctgtagctcagcaggacgttgaggcgatggagaagcatctcaacaacaagattgagtacctgaaggcgcaactcgcgtccgagatgaagtgcaaagaggaactgggcagccacctcgctcaagtgaccaatgctatggagcaaatgaaggtcgacaagcggcaggctctcgcagagcaggaagaagcgttcaagaagcaaatggagcggattgagactgggttctctcaagagaaggagctactaacaacccaacaagcggcattgcagggcaaactcgtcactttgcaggcgaacgtgaccgatctcgtccaggagctgacgatgtggaagagcagggaagcgaatgccaagcttgcgatggagaaaatggtcgaggagaacgttcgactcactcgccagcttgtcgatgcagaaggacaggttgaagctctacaggaagaacgtaagcaagacgcagccaaggtcgggtcgatgagtgtgatgaacgccagcgaggagaccaagcgtgtgcagatggaagctctcctccgtcgacttgacaatgagcggcagtatctcaagagtcagcttcaaggccagcaagagatgaaggagaagagtcagaaacaagtcacggaccttcagtacgagattcaggagctgaaggatgctatggaggaggctttgagagcaagtgagctgaagattagcgcgctgatgactgagaagaaaaaccaagagcaggagctgcaaggaacgatcgagtgcttggaggaggggaagcttctgttgactcggcaactgaaggaggtgcagaccaagtttgcagaagctcgagagcagtcgctgctggaacgtgacgagatcgacaagtcaaggattgaggtgagcgagatgcgagcccagctactagcagcaaaagaagatagtctcaaggagcagacgtacgcgaagaatgcgagtgaacgcatgtccaagtcactcgcagctgtgaagaactcactgaaggcgatggaggaagagaagaacacgcaaatcaagcggcttgaggaggagaatgctcagtatatggccaagttagccgccactcaaggagagatgctcgtacttgaagagaaacttgagaaggaaaaagctcgagcgaagaaggagaaggcgacggctctactggctttagttcttggtgagaaggtggcgctgttgcggctacgattgcaatatcgtgcttttgctcaagcaaaactgcacgccaaccttgtgcgtctgcaagtccagcaagaacagaggcgaggagaggagctggggcggcttgaagagcggctgcgcgaggactacatggcgaaatgtgacgagatgacgcagacgctgcacgacgagcgtttgggcgcgattcgcaggatgaaggaagagcacgacaaagatcgagaagagctcaacgagttctaccagcaggagaagtcccagctacaggaagacctcgcagccatgcatgccgcacagctccagcagttgaaggacaagttcgagtcaatctccaagtccgccgaggacgatgcacagggcaccattcaagcacttcaagacgaaagggacaagcttcaacaggataacacgcgactgacagaggagctgacagaactgacgcaaaagtgcgaggtgatggcgtgcactttcgaggatgaactgggtgcgttacgggcagactgggagcacaaacgagagagttggaacacggaacaagcagctcttcaagccgagattcgagctcaacgagatctgttcgaggagcaactcagctcagaagcgagtaaactagtacttgatcacgctcgggaattggcttcaatgcaggtacgccatgacgaggaaatgtccgagcatactgcagaattgaaggcccaaatggaaatgctgtcggaagaggtaaaacagcgaagtgcagaggtttactcagctgagcttgcggccgtcacacagaagcatcggatagagatggaggaggcgattcaagctgaaactcaacactggcaaaaagagatgactaatctgcgtgaagctcaggagaaggctcttcaagacgcgattgcagaagctgagttaagggcgaatgccgagttggcatcattgcagaaagagatgaacgagcgcaaaggctctgcagtggttcagtgtacttccaagtggcaacgggcaatggaggaactgcaggaacgccaggaagtggagaagaagatggcgtataatgaaggacaacaggaccgagagaaggagtggcagcaggcggcagtgcaaatcaaggagcggcagcgcgaagagcttgataaggtgcagcaagaagcggtggctgcgatccgagcagccgaagaacgtcacgagatgcggttccaggctcaactcgcagaactcaagagccaactggaagagcagcacgcacaagctctccaagctctaacggatgagataacaactcgagaacgagaacgagctcaagagcattttgatgccagtgctgaggtgatcgaacaggagctgaccgccaaatggacgcaagagcttgaggaccagcgaactcaacttgagagtaagctggctgaagataaagctcggttgatgacttctttagtcgaggataaagaagcagcacttctgcgactgcaggaagatcacgagaaccaacgtgtggagatggagaacgcgtggactgccaaactcgaagagcttgcatcaactactgctagcgccactgagcgacaactcgaatcactacgagaagaactcgacaaagaacgagaagagttgacgaagcagctacaggagaatttctccaagcagttagaggagcaacttggtgagcaagaggcgaggctccttcgagagcaggaagacgcgatcgcccaggttcaagaagactccgaaaagctcatcgagcacgtcgaacgagccatgactgagctcaagaagcagaaggagcatctcgagaccgaactgaactccctccgatccgccctcgaagaagctgaagacgcccaattcgacgctaaagagagtttcaagaagcagcagaagcacgctgcgttccacgtcctccacctcgtcatgcgtgcaatgcggagaatcaccgaggagacgacggcaagccaaacttctcgagccgcaatggaagataaattccatcgactcaaagcagagctcgccgacgaaaaatcgcaatgggaagacctcatggccaaaattcaggaaacttgggcccaactgcagtcgcaacacggcgagatgacgcaaaccttgaccaactacaagcgcgatgagttggtcgcccaccgcagctcgagcgccgtgttgtccaacgaaatctcaattgtcacgaaacaactcgaagaagttgaagagatgaaagtcacgttggagcggggcgtcgaagctctacagaccgaggcgcagaccatcgaagcttcactgcgagatctgatgttgcagtccagtggcaacaacagcgggtcgctgaatatggccgtggtggccaagaagcgccgactgaacgaggagttcgaggcgcttttggagcgcatcgagaagaagaaggctgagattcgcactgtggaccaaacgctggcgtctcttcgcgctaggagggaggagaaggagcaggagatgagggccatggagcgcaaactggtcgagatcctagtgcagcagcagaagcaaatgctgctgctggtctcggcggtgcgggaggtggcgctgccgaccatggccggctgaaagattgcttggtgcttattctacttcgaggacagtatttatcacagaaccaggtgtgttttattccgcgttttgttgttacttgttggtagccttctcctcttccaggcgcttgcgagcttccgtctccaccagcgcgtgcacctgaaaatgccaaaaagaggtgagactgattgatacaaggtataggtacttgcagtgtagtacgcacccgacgctcctccatgtatttgctctgcaggtagaagccgtagtaggcgcccgccaggcctccgcaaagcgcgaagatggcgcggccagtggagcttccgccgccgacgttcacgccgccgcgaggaccgcccgccatcatgcctggtgcgccgctcattgcaaacgaatatgtggtgtggcgcacattttgcattttaaatatgtagtgtgctccacaccaaatattctttagtgctcgcgttgttgctgaaggctctcgttgcggttcttcgctacgatcaatacacattgatacacaccgacactcaccgcaatgtctttttcctttatatcaatgctatacactgggccacttcaacttgcagatgaaacggcgctgttagacacggaggggcgccgactgcgacgctttagtgcccgagcaaccacttgccatcatctccagcatggcgcagtcgcgtcccggcgcgtcgctcaatgatctggagctcactgaagacgaggggcaaatcccatcaacgccgcagtcgaatggacccggctcgctgactccggagcagcagcttctggctcgcttcaggctgcacaagcagcaccggaaggagaaggagcggcgactgctgcagacgcgactcgctgcggcgtctcgcgccagtcgcagcgcagcagctgcagcagcggcggcaggagcccccagatcgccttctagcagaaagcagaagccgcccaagccaggcgccgtggacctcacgcgcgtggaccataacaaccacccgcaccgctggaagtcggcggaggagctgctccaggagcaggagaggagggcgcaacagcaccagcttacagctgcagcccccgtgcggccgtatcccggcaggttacgaggccaagctctagaggaggttccgagacagaccgcagctccagctgcgaaaggagagagcgctgacactgcaagagaagacgaaggcattctgcagctggaccagtcgcagttcccgctgcatctgttcgacagcgacgagttcgaagcccatacgccccaagagtggctcgagaaggagcgagtcggcgcgtcgccctacttcttccaaggcgagtggagatggcggagctgtgcggtgctgagctacgacacggctaaagcccagtacttggtgcagttccagggctcggacagacagaagtgggtcaggaggatcaacctccgcttcgagagcgagtccccagtcacgttcgagcgccgtgtggcggctgcgagagagcgacgcgaacaggtcaaggccatgctgaggttcgacgacttcttggcgcggcaggatgcgtcgcagctccgagcgatgggtagactaacactggagcgagttcacgcgcgagtggttgcgggtttacccgagcgcgtggcgctgctggactcgcagcctgctgcgttcctgctgcgccagctcacggacactgcgattcaagagtacatgcgcagcatgaagaaggccgcgctgttgaagcagctacgcaatgaccccgaattgcaagtgcgtttccaaggccttgaccttattcctggaccaacgaagcccggagcgatcacgtatggcaaagtggagatccccgagcacgactttgagagaaatcggcggcgtgtcagcaccgtatcgtacacgagctcaccccagctgcttgccgtcctgaggcgaatgtatgcgggctgggagaaaacgttccagaagctgctgctggttcaggtcgacaagagcctcgctactacggccagcacggaaaatcatcgagaaggcgtcagtgttgctgcgaatggagcaggtgcatccccaacgacgacgactttggcgtcgcagatgccgttccgtgtactggactttcaggcgctgcaggcgtcgcacgcgaataaagtagcagagattttgcttgtggattggcggcgcgcacttgtggagaacgtgatcgacaacttgcaggaccatttcgacttgttcctttcggaccgcgtggcgtacgatgccagtcgactcaagagagtgttgacggggttggagttacgcttggccgctcagctgcgtgaagttgttcatcgctcggtagacgagtgggtgcgctttgtgcggcaccacgcagagcgcggcagtctcgtgacgacgaggcctgggacttcgatgaaaccagatgacgctcaaggcgacgtcgctgctagttctcgtactaatggaggagatggcaatgatgaagaagaggaagacgcccccgttcgtccatctcgcaagcgctttacacaaatgctagaccaaaaggcgattcgagctccacacagctcactgttcagtgtccagcttggtttcgtgaacgacgaagtggttgtggagccgtcaacgcaggaagtgacggcagttctgttggaaccattggacgcaatagtgtccgcagtgcaggagatcgacagactggactgtgacatcatgggcttgttgtctctcgaccgccggcctctgctcgattttgctgttggacatgaacatgaatccgagaggcaaaaggccagtcgtcgggcggtagtagccgagtgtttggatgcgctccaggctgctaaagtggaagtccgtgacagtgttgatcacgctatgcaggcagcacacgcgctagcagcacggttcgctgcgtacacagacttcgtacactttgatgccacagcattcatcgctgagcttcagcctcttcaactgcaggaacagcagctactgaaggaaggcaaaacaccaccgacggcagatgagcaggcatacctgccgcaattatgcgcacagattcggagatttcacgagctggcgttctgcgtggacgtcatcgccttcgactttgtcgcgctcccgctcgtgtgcgtccataccagtgcgctcaagaagcagcttcgcactcgatcgctagagttgcgtgacacattaatctcgagcttagtgcgcgatgcgcgggcccaaaacctcgccatcactgcacggtacgccgctatcctagcgcgtatcaacgagaaaccaaccaacgaagcgcaacttgcgaagttgaagcagttcgtaggcgaaagcaaggcggtgattgcaggcatccagcgtgaggtggctgccattcacatacgactcgacgcattgaacgaattctcccacaagctctccgctgaggactttacattagcacactcgacgaaggagtggccgttgaaggtggcgcacgcggcggattcatgtgactcagctctagaagaggacaaggtgcgcatgatggacaggcttgcgctcgagaaggaagcgttcgagctggatttggagcactttgagggcgatgtgcaggcgttcacacgatacggtgaagtggagcacacggataaatatgtggagctagctatcacgctttacgacgcactccaagacgcgcgtgcgaaggcgctagactttaacgcccgtgaagccgtgtttggcttcccgcctacagagtacacgccactgttgggcaagttagagagcgatttcgccccgtactataaactctggaccatgagctctgaattccatgcgagtcgccaggcttggctcaacggaccgttcctagagttaaaaggaggcacaatcgaagggcttgtgaccgaatggtggaaagcttcgtacaagttgagcaagtccctggtagacgatgcccccggatcagctgaagtcgcgctcatacttcgagaacgtacggaggagttcaaagcctatctgccagtgatccagtcgttagcaagtcccgcactacaagagcgacattgggagaagcttcgacacaccattggctttgaggaatcggaggaggaactgacgctccagcttctgctcgatcgtggtatcacgcaacacctggagaccattcaggagattggtaccttcgctgagaaggagtactcgctgcaaaagaatctcagcgcaatgataggcgagtgggagaaagtggagttccagactgcgccataccgtgagactggaacgtatctactgcgaagtacggacgatatcgtggctctgcttgatgatcacctagtgaagacgcagactatgcgcggctcgccgtatatcaaaagtatcgagaaggactgcaaggcttgggagaagaagctgcagtattcgcagcaattgctcgatgaatggatggcctgccaacgcacatggctgtacctcgaagccatcttcagctcggaggacattatgcgccagatgcctacggaggctcgtcgctttgcgagtgttgacgcgctgtggcgtaagacgatggaagacaccgtagccgacccgacattcctcacagtcattgcgatggacaagctgctggccaagttccagcgtgcaaacgagaagctggacgagatccagaagggattgaacgactacctggagatgaagcgtctgcatttccctcgattcttcttcctctcaaacgacgaactgctcgaaattctctcgcaaacgaaggagccgcgtgctgtgcagccccatttgggcaaatgcttcgaaggtgtcttcaacgtgacattccaggacgggcctcctctgatgatcactgaaatgcgctcggcagaaggcgaagtcgtgcccctgcgactacctgtgagccctgagagcaacaaaaacaaaggcaacgttgagatgtggttgctcgaggtggagcagagtcaatgggatagcgtacgtgaccaaacggagcgctccatggccgcttacccgctcgaggatcgagagacgtggatgctcaagtggcctgcgcaagttgtcttggctgtctcgcaggtgtactggacacaggatgtgacccgcgcactgaatcttggcgacggcgcgaacggaatcaaagcgtacgttgaggtgctgaactcgcagttggacaagattgtgatgcttgtgcgtggtaatttgaccaagctcgagcgcactacaatcggtgccttggtggttatcgatgtccacgcgcgcgacacgatttcccacatgattgagaaggacgtggagagcgatcaggacttcgagtggatctcgcagcttcgctactactgggctgaaggtgtaaagtctgccggggtctttgatctacaagctcgtatcgtgaatgctcgcgttcgatacggatacgagtacctcggcaacaccatgcggctagtgatcactccactgacggatagatgctaccgtacgatgatgggagctgtcgacttgatgtacggtggagctccggaaggccccgctggtactggcaagaccgagacggtgaaagatctgagtaaggccatcgccattcaatgtgtcgtgttcaactgctccgatggcctcgactacctggctatggcgaagtttttcaagggtttggctggttgcggctcctggtgctgcttcgatgagttcaatcgtatcaacattgaagtgctgtccgtcattgctcagcagatcctgacaatcaacgaaggcaagaaggctggcgtggacaagttcctgtttgaaggaacgttcatcaaactgaatgcgagtgctaacgtctttatcaccatgaatcccggttacgctggtcgtgcggagctgccggacaacctcaaagcattgttccgcccgtgtgctatgatggtgcccgactacgcgctgatctctgaaattcgactgtactcctttgggtttgcacaagctcgtagcaacgctcgaaaactcacgcaggtgctgcagttggcctcagagcagctatcgtcacagaagcactacgactacggtatgcgtgctgtcaactcgatcctcgtggccaccggagccttgcgtcaacaactgggcaacgacccgttctggacggaggacaagattgtgctgcggtctgtgcaagatgtcaacctgccgaagttcacatctgatgacttgcccctatttcgtggtatcacctcggatttattccccgacgtgctgcttccgcttccggaccacggtgcacttcttcgccatatcgacgagacttgtgtgcgtggaatatctatcgttcccgacgttaacattccacttgagtgcaagcccgaattcaagatgaaagtggtgcagttttacgagactgtgcaagtgcgtcacggcctgatgatcgtcggtacaactggctcaggcaagacgtgcgtcgtccactccctcgcaacggccatgacctcatgctacatcgaagaaatcgagctgcaggaagagaacggcaccaagggagcccccacgttacaacagcgcgtgaacatccacacgatgaacccgaaggctatcacaagcggccagctgtacggaaacttcgacgagaacacgcacgagtggtctgatggtgtactggcatgcacgtatcgtaattgcgcgcgtgacacaagtccagagttgcagtgggtaatgtttgacggccctgtggatgctgtgtggattgagaatatgaacaccgtgctcgatgacaacaagaagctctgcctcatgagcggtgagattgtcaaaatgacggatcggatgagaatggtcttcgaaacggaggatttggaagaggcttctcctgcgacagtctcgcgcgtcggaatggtcttcttggaggcaaaggtgctgggctgggaggtgctcgtgcgaacgtggctgaatacgcggctgcctgttgcgtttgcctctcacgtggagtatctcgaagaatcattccgctggattgtgccgccaatgctttactttgtcgataagcactgcacagtgcccacccccgtgacgttcctggagcatgctgcgtcattgctgagactcttcgagtgtgctctacgtgatggctttcctgaccctccagctgatggtacgacgccagcggcagcttcatcttccgtaccgactggtgtagactcacaacgcattctggaatgtgtgctcgtcaaggcggtcatctggtctattggtgcttgcattgacaccaagtcgcgccgcattttcgacagatatctacgcgacttcctctcgactgagctcgcagtggctgtggtcacggctgatatgcacctgcaggacggtgaggaaggagtcgatgatgaactaggagtacctccttcaccatcactgctttacttcaaggacttcgtggcgaaatctccgtcgtacgtgctcctacctgaccgcgcggctttacttgctattccagaagaggggctcgtctacgattatcgctttgatactcgtcgcagtgtctgggtcaattggatggaggcgtcaggaggcggtgcattcgtgatcccgcgcgacgcccaattcactcaagtgctagtgcccacaatcgactcggaacggaacgcgtggttgttggacacactcatccgccatcacttccacgtgctgtgcacgggtgatactggtacgggcaagtctgtctcgatcaaaaagaagttgctcagtggactgaatgatccaccgggggcaagcgattcgccacccaagttcgctccgtcaatattcctcaacttctcagcgcagacgagtgccaaccagacacaagatctaattgaagccaagctagacaagcgtcgtaagggcgtactaggtcctccactcggacagagttgtgtgattttcgtggacgatctcaacatgccagcaaaagaaacctatggtgcccagccgccgatcgagctgcttcgccaatggatgggccacggcggctggtacaatcgcaaggacaattcattcacgcagttggtggatatccaattcattgcggcgatggggcctcctggcggtggccgaactcgtatcacgcagcgctacgttcggtacttcaacctcattaacttcgtgccgttcgacaacgactcgctccgagcaattttcacgaggattacagactggttcttgcttaacttcccacaggctgtgaaacagctcggcggggccgttgttagtgctaccattgatatctacaacaccatttcccaggctctactgcccacgccggccaagtcgcactacactttcaatttgcgcgatctgtccaaggtgttccagggcgttgcgcaggcgtcaagtgacaccatcaaagacgggaaggactttgtgcgtctgtggagtcacgaatgcctgcgtgtcttctctgaccgactcattgatgataaagatcgcgcgtggttcgccgacattctgtccaagactgtgaagctgcacttcgacctgcaatacgcttcgacagacgtgagagggccgaacgccacgctcatctatggcaactttggtggtgcaggcgatagcaagaatggcagcaagaattacgcagagcttcgtgaccgcgagaagctacagaacgccatgcaggtgttcctcgaagactacaacaacatgagtgcagctcccatgcgtctggtactatttcagaatgctatcgagcacgtggcgcgcatctcgcgtgtgattcaccaacccttggggaatgctcttcttgtgggcgtcggtggcagtggacgcaagagtcttacgacgttggctgtgttcatggccgagtataaactcttccagatcgagatctccaagtcatactcgcggacggagtggcgtaacgacatcaagaaggtgctgcaactgagtgggctcaacaaccagcccacagtcttcctgttttcggacacgcagatcgtggaggaggcgtatctcgaggacatcaatgggctattgaacaccggagaggtggccaacctctgggccaacgatgagctagtgcagatgaatgaggcgctggagcccgcagccacagcttcgggcgtcaacgccggcaacagtgcagagctgtacaactttttcgtgggacgctgccgaaccaatctacacattgtgctggcgctgtcgcctatcggtgaagcgttccgtcggcgactgcgaatgttcccgtcgctggtaaactgctgcactatcgattggtttgccgagtggccggacgaagctcttcgctccgtggctgactatttcttggtggatatcgagctgccagctcaagtcaaggttggtatcgtggacgtgtgtgttggaatgcaagaaagtgtgagcgcgcttacgcgtgacttcttgcaatcgctgcggcgatattactacgtcaccccgacgtcctacctcgagttgctcaacactttcaagaaattgctgaacaacaaacgtgtggaggtcatgaccatgaagcagcggtatgacaacggactcacgaagctcatggagacggccgagcaggtggagaagatgcaggttgagctggaggctctacagccactgctgaaggtggctactatcgagacagatgcgctgctggagacgatctcgcgtgagcagaaggaggcaaacgcgacgaaagatattgttggtgctgaggagaagctgtgtaatgagcaagcagccgacgccaatgcgatcaaggagagttgtgaggcggaattggcagaggccatcccagccctggagaatgcagtcaaagctctgcagacactcacgaagggtgacatcacggagatcaaggccatgaagaagccacctgacggagtcaagctcgtgatggaagctgtgtgtattatgatgcgcgtaccgcccgtgaaggtcaaggaccccgcgggaggcaccaagaaggtagacgactactggggacccgcacagaagacactgcttggagacacgcgattcctgcagaatttgctggagtacgacaaggataacatcccagtggaggccatggacaaggtgcgtccgtatgctgcgaacccggacttccaggccgacaagattcgcaaggcttctgtagcagcttcaggtctgtgcagttgggtgcacgctatggtggtgtacgatagagtggcgaaggtggtcgcgcccaaacgtgaagcactgaaggctgctacgttggctctggacaaggcgcagagtgagctcaaggtcaagcaagacgcacttcaggtggtgctcgacaaggtggcgcggcttgaagaggacctcgctgctgcgtataagaagaagagcgacctggagttccaggtggatgactgctccaagaaactgacccgagctactcagcttatcggtggcctcggaggtgagaaagctcgatggagtgatatgtcggcgcaactgcaggttgtgtacgacaacgttgtaggcgatattatgctggcatccggtgtgatcgcgtacctcggtgcgttcaccagtatctaccgcgagcgcgctgttgatctgtggtgtaccgagctcacgaagcaagccatcacgtgttcaaagacattcacactcacagagacactgggcgaagctgtgcagattcgtgcgtggacgatcgcaaagctgcctaacgactcgttttcgatcgacaacgccatcatgttgcagcgcagcaatcgctggccgttgatgatcgaccctcagggccaggcgaaccggtgggtgaagaatatggaggagagtaacaacctcaaggtggtgaaacaatcgcaagctggctttgtgcgcatgctggagaactcgattatgatcggcgctgctgtgctcatcgaaaacatgccggaagagattgatccgatgctggagcccattcttctgaaacaggtagtgaagactggcggcgtggccacgattcgtctgggcgacaacacggttgagtacgaccccaacttccgcctctacatgacgacaaagctgcgcaatcctcactacccaccggagacctgtgtgaaggtcaacttgttgaacttcatggccactgaagagggcttacaggatcagatgctgggtattgtggttgccaaggaggaacccgtattagagcagcaacgagagaagctggtgctcgaagatgcggcgaacaagaagactctgaaggagatcgaagaccagattctgtatctactgcagactgccaagggcaatattctggacgatgaacggttgatcgaaaccctcggtgcgtcgaagatcacggccaacaaaattgaggagaaggtgcgggaggctgcagtgacgcagcagatgatcgccgagaagcgccaaggctacttgcctgtcgccttccgggcctctcagctcttcttctgtatcgcggaccttacagtcatcgaccccatgtaccagtacgcgctcgagtggttcattaacctcttcgtgttctcaatcagtcgggcagagagctcctcggtgctggcgacgaggcttgacaatctgaacgacgccttcacgttcattttgtaccaaaatgtgtgtcggtctctcttcgagaaggacaaactactgtttgccttcttgctggcgatcaaaatcctggtggggaacggaacaatcgacggtggggaactccgctacttcttcacaggaaatacacagatggacgtacagaaaccgaagcccgcaggatccgaaggatggctgaatgacaagacgtgggccaacatcgtcggcttggacgctctgccgtccttcatagaattcagtgatgcgtttgcgacggagctaagtctgtgggaggtgtcatacaactcgactgacccagccgagactctgacgaacatctcggctcttgccacgctggacgcgtttcagcgcatcatcgtattgcgttgcttgagaccagacaaggtgatccccgctgtcatgtccttcgtggcgacgcagatgggccagcgcttcatcgacccgcagccgttcgatctcaaagctggattcgacgactcgaattgctcgacaccgctgatctttgtgttaactccgggtgccgatccaatgtccgagcttctcaagttggcggcagagctgggattcaacaagaagttcgtggcgatctcgttaggtcaaggacagggtccactagcagagaacgctatcgcggaggcaatcgacaacgggacctgggtgtgtctacagaactgccacttgtctgtgagttggctgccgacactagagaagatctgcgaggagattacacctgaccgggtgcacgcgagctttcggctgtggttgacgagcgagcctactcgagcctttccgtcttacattcttcagcatggcgtgaaaatgaccaacgaaccgcccaagggaatgcgcgcgaacctgaagggatcgtacttgacgatcgatgaagggtgggttgccagttgtcgaagaccccgtgaattcaagaagctgctcttcgggctctgctttttccacgctgtggtgcgtgaacggaccaagtttgggccattaggctggaacatcagctacgtgttttcatcctcggatttagccatctcgaaagaccaactcaagatctctctggacgacttgcagccggatgacccgatcccgtacgctgccttggcgtatctcgccggcgagtgcaactacggcggtcgagtgacggacgacaaggatcggcgatgccttatcacgatcctctcggacttttacacccgcgatattctgtcggacagctacactttctcgccctcggggttatactacgcgccgtccgccgacggctccctgtcggtgttcctgaactatatcgatcagctacccatgaacgaaggtccagaggtcttcgggctgcacgacaacgccaacatctcgactgccatcgccgagacgaacttgctgctggaatcggctttatcgctgcagccgcgaggcgcatctggaggcggcgggggcgcagtcaagtcttgggatgaggtgctggacgaaacagctcgggatattgcggccaagctgccgccactgtatgacctcgagaaggccgagctggcgtttcctgtctcgtactctgagtcgatgaacaccgtcctgacgcaggagctggggcgattcaatcggctgctcgcgctactgcagatctcacttgtggagatccagaaggccatcaagggactcgtggtcatgtctgcagagctggaagccatgggcaacagcatggtgaatggccacgtgccagcacggtggtcggctgtggcgtacccttctctcaagccactcggtagctgggtcacggacttcctggcgcgtctagcgttcttgcagaactggctgacgcgcggcgcagcgccgccggtgtattggatttcgggcttcttcttcacgcaagctttcatcacgggaacgcagcagaactacgcacgtaagcacaagctaccgatcgatcaggtgggctacgacatggtggtgctggcccaacctgcttcagagctcacaacaccagcggaagatggtgcgtatgtcgatggtctcttcttggaaggtgcgcggtgggacgccaccactcacaccctggccgaatccaagccgcgcgagctctacgtgccgttgccggtgctgcacttactgcccaaggcacgtgatcaaatcgagccgatcgaggataccgaccccaagggcacagcgcacgtgtatctctgcccagtatacaagacatccaagcgacagggaacgctttcgactactggtcactcgacaaactttgtcatgtccgttcgcctgcccatgagtgcacagcaccgacagaagcactggatccgacgcggtgtggcgctgctcactcaactcgatacgtgagccagctgcagcttccccactagaaacccacagcttaagttgccattgtatattatcccaaatagcacctgctccaccaatatgcgaagttcttgctacgcaacatcatttattcggattagcctcaaggattgtagtcagcctgagtagcaaaaccattccgggcaacgtgttcaattcacgtggcatgtgccggtcccgactcttgaatgtcatcgcgagaagcgttatgtgagtaaaatgcgtagccgataatgcttgcgctcattggagcagagcaatcgagctgatggagcgccggtccattcctatcctcacgataagcagagttcggtatcgatatccgaagtcgttatttcggaattcccaaactatggccaccaccgacaatttgagacgaaaagctgccacctcccaactcgtccagaagctggtcgtttggtttgcagcggggatcgccatcacctcagctctgctagcatctagacacacaaacgacgacccgcactcttcgaccgtgacggttcctacgaacaaaggctctggatggttcctcggtggaatcgaccctgagtacgtcttgacttcacttccggaaattcactcactggacgacctgcctggacattgggactggcgcgactacaacggcactggtttcagtctcacaaccagcgtgttgaaccaaatggtgcctcgagcttgtgggtcttgctgggccttcgccacggtgagtgcgctgtccgaccggattcggatctccaagttcaaaaagaccggcagactcgacgcggaagttttgctgtcgcctcaagtgctgcttgactgtggtatgcgcacgtttggctcgtgtcgcggtggagaccctcgatacgcgcacaagtggatccatgaaaacggtattgtggactcaacctgcagctcgtatgtcgcgtcgcatccttcctggataggaggcaatgactgcgctgcagcgcagtgccatacgtgcaccatgaacggagattgctttgtggtggaagacccggtcaagtactacatatcggagtacggaacgctgaatttcaccacgtcggaggagttccagctgcaggccatgaacgagatctaccatcgcggcccgatcgtcgtgagcatgtactcgttgactccagagttcaagcagtacaagggcggctacattctgcgtgactccacgaagtatccgggaactacacacgtcgtgagcctcgtgggctggggcacggataccggcactggaaccaagtactggatcgtacgcaattcgatcggcacgcactggggcgaccacggatatttcctcgtcgagcggggcaccaacacctacaacatcgaaaacaaaggagcttgggcggtccccatcgtttagaagcgcataactctcccatggttaaacttcgcttcacaaatgtacgacgcgttcacattcacaacttcgtcttgtccgtccagcttggtcaggcgcagaagccagctgcacactttgcagcagagccccatccatcctacagcaaatcgatcgtctcacctagcgcgtcgacggtgaacaaacagctacgagtggtgactgctcacgtgatgcaatgcaacctttgcggcgacaaatgcacttccaccgcagtgcattgcatgtacacacttcgagcgaactccgtgcagaccctggcccacatcaacacgtagattacgttgacatgggacgcagcgcgatcgacttcggcgtgactcgcgtctgcggctccagaccattggacggccatcgcagcattttgggacgagggcgctccacacacccgttcagcgttggccctcgaagctcgcttagccgactgccgatggtgcatcgctgttgggcggcccaacttgggccagagctctctcatcggtcggttacacttcaagatggacacgtacgttcttttctcgctgattggctacgtcaccaaatttccgccaatcgcaggggttcacgtcgccaaaatgtatccatcccctctgccccgatccgaaacgtgtcgagctgcaagagagaagaacatgagactctctctctctctcgcccgctcacatcgcaccgcactccgcaattttctccagcgagcagagtttcgacctccacgatccggcgccaatgggaataaccgacaagtccgatcttccgctgctgcagccgcgcaccagcacgctcctgaattccgacaacgtttcgtccacctcaacgacatcttcaactctgttgcaatcgacttggacgaatatccgagccgaccgcttcaagctgcgctccattggctccgtgatcgggtggattgcggtgggcagcttcgtcagctcggtggcgttcgcacccaagcaactgaccgacttcacgaatggcggcgtctcgatgcacgcggttcaagggcaactcgacttgatggcggcgtgcacctcaaccggcagtgccaatggcgagggcgatgtggcggagattcagacaaacaagggtgccggctggttcctcggtggcaacgaccccgagcacgtggtgacgtccttgccggaagtcgcgtcgtttgacgacctcccggagaactgggactggcgcgactacaacggtaccggcatcagtctgacgacgagtgtgttgaaccaaatggtgccccgggcgtgcgggtcttgctgggcctttgccaccattagtgcactctcggatcggattcggatcgcgaggttcaaaaagaccgggcggctggacacggaggtgttgctgtcgccccaagtgctgctcgactgtggcatgcgttccttcggttcgtgtcacggtggcgacccccgctacgcgcacaagtggatccatgagaacggcattgtagacttgacttgcaacccgtacatcgcgtcgcacccgtcctggatgggaggtggcgactgtgctgccactcaatgccacacgtgcaacctgaagggcgagtgcttcgtgctggaagaccccgtcaagtaccgcatctcggagtacggcactctgaacttcacgacgtcggaagagttccaactgcaggccatgaacgaaatctaccatcgcggtcccattgtcgtgagcatgtactcactgtcgccggagtaccgccaattcaagggtggctacattctgcgggactcgaccaaataccctggtactactcacgtcgtgagtctggttgggtggggcaccgacgccgagacgggggttaagtactgggtcgtccgcaactcggacggcaccaactggggcgaccgaggcttcttcctggccgagcgaggggtcaacatctacaacatggaaggtcacggcgcctgggccgtccctattgtatagagagccacccgacgacaagctaaatcccccgttggccagagagctacatgtaccaaaagagcaacattgaagttgctgtaatgttgaagccatctctaaaacgtaaattgaagactattttacaattatggactatactcggactatttccttcaccacctcagattttgagtgcagatcaacatgtcatcgttgctgctccggtcgtggagctcgtcgcgtgcaggcgtcagctgccgctctttgagcgtgttgggcggcatctccgaagacctcctagtgtccaccagcatcggccaccaaatcggaggcaactcgcactcggagctggtcgacagcttggtgcgcacgaatgtggtggctgctggctcgcggctggaggcggcgctgaggcgcgtggaccgtggggacttcgtggcgccggctttccgggacaccaccgagcgctacgccaatcgcccgctcaagatcggcacggtggctacgatctccactcctcagcagcacgcgcaggtgttggggctcctggagccgcacctgcagctggggatgacggcggtggacgtgggctgcggatccgggatccttgtggctgccatggctcacttggtgggacccacgggcttcgtgatgggcgtggacattgtccccgaactcgtggagttctcgaaggagaatttgcagcgcagcttgggtaacgaggcagccgacaagcagacgaaggtcatcgttagtgccgggaaaaaggacctaggcctgccggaggatggacgatacgactgcattcacgtgggtgttgcagtggagactaaggctgaagcagaaagcttcttggagtacctgaagcctggaggtgggctcttgatcccgcttggcggtgcgggagcagagcagaagcttgtcaaggtgagccgtgtaatgctgggaacgtgatagaagtgttatgttttgcggctgacagttctgttgtgcgtgtatagatgactaagcttgccgatggaacggtggacaagcgagacgtcatgagcgttttgtgccagccaatgctggacagtatccctgtagaagttgtgcgtgacactcgcgctgagaagctggcgcgggtggaaaaggctctgacgcagtggcgtgaagagtttgagtacaagaacggacggaagcctacgcgagatgatctcatgggcaattctgagtcgaagaagctcttccaagagttcgcggcgttgaggaagtaaatagatgagtgggtgaacttctcgtgtcgatttcactgagttaggctgttcactttcgaggagcgtgctgttgtgtcacgcatgagctgccttggttttttgcaggagctgctccgcgagctcgatctggtgagtaatgtgttcacgctgagtcatcctggcgtagcgcggtgggttctcaggagacacaaacgcagcaagtgactccacgatggtgtctccgttggcaccattgaagcgcacgatcgactggcgcttcttctctgagttgcagactcgatgctgtggcgcacaaatccaagcaactaagttagaacgggagcttgcctttttcagcggtagtctacagcagatgcaatgcatacctcggtcgcaactaggacaccgttcgtccagtgctcgagcatgtcgccaaccatgacgaagagcctgatggaataaagcgaaggaaagtgagtcagtctcaggctccacgatcggtcgttgtagtttgaaaccttcgtacctgtcatcgcatacaggagcttcgacccaatcgccctggcggttgagcaggtgcagaccctctccattctggtggatgatagtgaagcattcaaagtccgtatgtgaggcaatccccaccgttgaattcttcacaagggcgtcaatctccgggtacgtcagcagtcgcatgaaggcctccgcctcttcatccacatgttgctgcaaatccccaaacagcaacgacgtgagtgcaacgataacgtctgcgacagtcaaaaagatactttgtgtacacgtaccaggaacgtgtcaggtggtagccccagcatctccgcaaagcttcggaacatcacggtcgacagcttcgtggtctcctcgtacagcgcgtacacgtcctcctgaaaacccggcacctcggccggccagacattcggccccagactcgatccttccttcacgtacgactcgggcagctcccgcgcgaggtcgaagccttccaagtgcgacaccacgtccggttggtactgcaacagcaatcgaacacacatcagcgtaccaaccccaacagattcacagcattaatccatcgtaccgatggctcttcaaacatgggcgtccagcctcgcgcattgggcgagcgcttgcaatgatacttctgcttgacagcgtccggcagcgcgatgaactcgtccgcccgacggtacgccgcctggatgagctcgctgggcagcaccccctcggtcgggaccgtgaagaatcccgtctcgatgcacgcagcgcgcatgtcgtctaggatctgcctcttggtctcttgcgccgcctcgcgcccgctgttggctgcagccacgaggggcgagacgtccacgagcgggagctgctgcagcgccaccttggacgccgtcatcacgcgcggcgacgagaagttgcgggcgcccagcgccaggcgagacgcagaccggaggcgtgcggtccacatggcgaatgccaaactgacggtcatcactgcatccacttcaacatggtgtgccgtacataaatacactgtgtatcgtcatctgtacatcctatcgagcatcataacaggcacacccgagcaataaggcagatccagcggcaggcagcatgtcgtacctcgcggcgtcgacgcatttcaacaactgggtcttcacgacggaggagctggcgcgcgtgcgtcggctgcagcatgtgaagaccaagcgcgcgctgcgtctggagcgcgaggaggcgcagaagcccgaggcgtccgccgccagtagccgcaaggcgcggtcctttgccgcgctcgtgccgcgctcgtccactgctgtgcgcgacgccttcgactggaacgacgaggtggacgtggacctggcgacgcaggaggaggcggaggagaaggccaatctgcagctgacgccgctgctggagttcctgagcccggaccaggaggcgctgctgcgagccttctacgaggagaagatccaggagagctgcagcgcccaattcctgcgcacgtccgacaaggtcaagtgctgcgccatgctgctcttcaagcgcttctacctgagcaacagtgtgatggagttccaccccaagtacctcgtgcccacggccatctacgtggctggcaaggtcgaggagcagtacatgtccgtggacactgtcgctgaccagctccatgtggaccacaagttcatcattggccacgagatgatcttgctcgaaggcgtgcgcttccagctgatcatgtatcacccgttccgcgcgctgttgggcttcttggacgacttccgcgccttcgccaagcaagtgctgaagaaggatctggctgcgactgttctgcaaaagctgcacgccaactcgaccgcgttgctcaacgacttgctgctcacagatctgccgctgctgcattatccgtcgtatttggcactcgctgcgctctggcacgtgacagatgaggtcgctgctagcagtggcgaaaaggcttgcgggctcgtgagcgccgacgtgttggagtacatcaagaggagcaagttttcgaaggaccagccagtcgacgaggtctctggccggttggagcagattacagaggcgttccaaacgctcaaggcagagaaggtgaacggcggcgaggaggcagtgcagcgtcgtgccaagcaggtcaaacagatttacaagaagctgaagcagttccacaaggacgacgacaagaaggacaagaagaatgacaagaagggcgacggcaagaagaaagacaagaagcgcaaggatggatccaaggatgacaagaagaaggtgaagaagcataagaaggacaaggcttaagggttaaacgcgcaggctctaatggacgctcagatgttagattaaaatctgtcgcctttgataccattgggacaggcactgcggcgctatatcatagtacataggattgcacgtggcaaatgtttattcgtctacctcctcgtcttccgcttcttcatcgccttcttcctcctcgtcgtcgtcgtcttcatcgtcttcctcctgttgctccgctgccagcttctcgcctgtatagacagtatccccaccagtaagttagccgcaatgctctcagaaatcaaagtaaagtatagagcccagcaagctaaacgtacgcagaatctcgacaatagcgtgctgcgtgcgtcgctccagcttgcgcagcatcggcgcgatgtcgcgctccatgtcccagttggcgcgcttcggcgcgaggttcaacagctcgtcgtcgctctcgtcttcagtcttggcgtcctctacctcgacatttgccaccttctccacaaggtcctgcgcgctctcgtcggccttttctgcggtcacctcggcgtcctcctgctcctcctgtggcttcgtctccttctcctgctgctgcgcgggttcgtctgcgactgttttcaaggctgcggcgactagttcgacggcctctccgttgttgctctcgccgcgctccttgcgcgccttggcctcgcgcagcagcttgagccgcttggcgcggggcatcgcatcgtccacgtcgggcatggtcaccagcacttggggtcgtaatgtggtgtactcaaagtgtggcttgacaacatgtgtatgcagaaactataattacagtttccgacgaaaggaaatttaaactattcgcaaatggctaatgtgaaattgctgatgtgtagtacacaccaaacatgtgtctgcaacccaacttccgatcttgaagccatcgtcggaagaaagcaccagatgcacgcccacgtcgacgtcaaggagaagctgctgcccaagattgagccgatctcgccccagcgtcagcgccagcgagcgggcgcccgctcctccaagcccggcggctccggtggaagctgcagtgaggccgcgcgtcctgctgcgccttctgtgggctgcggacgcacggggcagctgcggctggcggcgtggctgatctccatctcctccttcatgtggggcttcagcgccgccgtgctcaacgtgtgcatcgttccggacgccatcggctcgctgctcgtggacatcaacctcaccaccgaggagcaggagcgcgccacggcgctcgtggtggtgggctgcgtgctctcggcgctcaccacgggcggcgtgggcgcgcgcgtgggccagaagaagacgatcctgggcaacaacgtgctgtacatcattggcggcgcagtctgtgcgctggccacctccaagcgtgagctctacgctggccggctgctcatcgggctggcgtcgggaatcgtcaccaacacggttcccatcctcttgaccgagatctcgcccgcagtctcgcgcggcgagatcacgtcactccaccagctcagtctgactattggtatgctggtgtcggctgtgttggggttcttcatcatctccaacgtgccgtcaggatggagatacctcaatggattcatgatcctgcctccgttggtgcagtgtctgagcatgtcatttgtatcggaaagtccgtggtggctaatgaaaaaccggggacgagaggagtgccgtgcaacgctgatgttcctgcgtcctgttaatcagaaggacgctatcgaaacagaagtgcaggaaatcgcccgcgtgatggagcaccgccagcacgagcctcacgtgacctggccgcacctcttggcgcacaagaaagtaatggtgaccggcaccgtcctcatatttttccaggccatgacagggatcaacacggtaatgctgtactcgaccaagatttttcactttgcaggggtgacgaacccgttctttgccacagctgtggttggatttacgaacgtgggtgttaccatcatatcggttcgctttgtcgactcatacgggcgacgtccgctgctgattgtgggcacgaccgtgatgatcgtcgctttaggagttctcagttggtcgctgctctacctaagcgacaaccttgcggttcagggcacggttgctgtgatttcggtgctgatgtttgtgggaggctttgctgtgggcctcggtgctgtcgtttggtaagtcatcagtttgtgcatgatcaccttcgtcaatcattacaactttatgcatgtcattgtgctcctcagggtcatgctgggagatatcactccagtgcacatacgttctcgagcgtttgcgttctacatggctgtcagctatctctgcaacatcgtgattgccgtgtacacgctgtctgccatcagttttctaggacgcggttcgaaccccgagaagaatggtattgctaagctctacctgatattgaggtatgtttcaccagcagagaaaaatcctagtgcgaagtgcttacttcgaagtactaactttgtcttggcgtcgtcgattatgtcagcggtgttgctgtggtgtgccttgcgtacgtatacacgttcatcgaggagacatcgcatatcaaaacgacccccgccaagctagctgctgatcaaaaatcgctcttgtctgaggaggatccagagggtttggacgaggagttcggtcttcctcgtcaaacaactgatctttgattgaggaaagtatcgtgcgtgcgttatggtaccgttccaattaatagtcaaaatcggaaacgacaacgattccattaccaatgtgttgcgatcttttatgattcattccctgccgccttgttgctttagccgacgaatgcgactacttcagaagttgagcggcttcggcaatctccttaacagctttggcgaccgagatgagccgttcgctgtggtcgttcggtgacagcgaatcggtaagagcctccattttctgagagcacgaatataacaacacgttccaacgttaataccagcacacacaagaggagagcgatccgccatggtgagtttgaggtttgccggcttgctgcaatgcaaagatcagactggtgcgtccttgtgatcgtgcctcaaaacttcctcgcattgcgtagtgaatattctccagaggcaataaaccgcaggtgggatcgccctcagactagaaaagatgcgggtgttccacctgatagagcgcagcgagagtctggcggcggatggcattgatttcagcgtcactttcggcgccgttaaggctcgccgcattgtcgatcttgcgcttcggtactagcaacaatcaacaaaacgcaatcgtcaagctctcaagtaaaagatcttccaaacaatcggagctagcataccaggagcttgtgccatcgtggctcgctgtgcctttgcctgctcaagttcctgcatctctcgcgcctgcttggcttgctcttccaagcggaactgctgctcaatacggcgtctgcgctcttcctcgtagcgagcctcagcctccgcctcctctgcagcggcagctgcagccatctcttcggcctcctgctccgcctgcttcttggcctcttcctccgtaaccacgtactggtcacaacgcacacagaacatctacaccatgcagcatacggtattcgtattcacagtcagccacccgttatgcagagcccacgcgcaaagcgtgatgcatccccaccttgccgttcttgttgcgcatcagcggcgtgtagcagtcctcgaccgggcaactggcacccagcatcgtccagccctgcagttcaagctttggttagcaatttattctactgcaggtggaggttcaagctccatctacctgcagcatcttctcgcccagcagcttgctggcctcgtcacgcgagcgcttcacgggtgcggtctgctgcatgtagcaacagataataaaacgatagcaacgttagctggatagctgcatggacgcaggaaggtagcgagcttcttctgcttaccgcgtccattgcaattcactcaatggtctcgtttatcactttagacagttatccttcgtaagcttatatctaagtagccgttatggcgggaatgcatttcccgctaaaacttgttcaagtgtagtggcctcaaggatcgaccatggctgaagacgcctcgacgactgtgcgcgtgtgtctgacgcgctgcccgctgccgcccgcggaggagcgcgtgcactcgctgccgtgtcgcatcctctttgacggatctgcagcggtgaaaaccttcttccaaccgcagagcggcgacgccgacagcaatggtactgctggagaggagcagccggacgtcaacaccgagaaaagcggcggcgacaatgacaagatgctgcgcgccgagttccgcggcatccagctgcagggtcagaagctggcgctggcgcccatgggcttcaccggtgcgttacgtggtattttgctggtcgagcgttagtcggctgacggaatttgtgtcgtgtgggactcgcaggcctcgtgctggaggatagtggcatgcggcacgcagacgatgaaggccggatttgggaggtcgaggaccatttcgacgagctcacgtggtggtgagtggctgctgaatggtaatgtggcaacttgccactggcaaggaggtatatactaatactgcattgctgctgtgctactagggacgcgccgaaccacacgaccagcgagacgcatcagctcccgctggttctgcagcagtggcacgacctctccgcagcggtacgttctcagcgcattggctggctgccagtcgatttcgtggatgaaggcaccttcaacgtgtgcgagtcgggcagttgaagcattgcgctgatgctgcagtgtggagacgacagattcgttcgcgggccccactcgcgcgagtgaagcgtgccccgacctccatgcggtagcgaagcgctgatcctctaagtaacgctgcgattgttgtttgcatgtagattcacgacgagtaggtgtcagctacactagttgaaaacctcggccaagcgtgaggaaatcgaccagccacagagccgctcaagcacctccagcagatccccttgctgctgcaattacgaagcgaaagcggcttcaactcggtgatgactcgcaaagggcaactactgtgacatcacgggcaccaccgactgcacacttccagtccccaaaagctacgaaatcatcctttttttgttaatgttgcccgtttttgccaaagagtccggtggcgttagtaattactaccttcgacgctgccattgtcattttaccagttcgaaactcgcgagctgcccgagatcgaggctcgacgcgccatgctgccgccaccacgcggcgcgcgcgctcactcgcagtcgcactcgctcgcgacaaggaacaagctgaagctggagctgcccatgtcgacgattgagatgctgcgcgcggccgcggccaagctggtgctgctgcccgtggtgggcgtgagtctctgcggggccgtgaccatcatgctgggcctgcagtggatggaggcgctgcagcgccaacgccaggcgctcaagtggcgcgcgcgtctgtgggccgcgctgctggcgctgctgctaacctttctgccgtccaagcggctcgaggcggccgtgacgcccgtggaccgactggagaagggccggagcgagctgctcagcagcggcgacaagagagacgcccacgacggagacgtcagcgggcaggacgacgagagctacgcctctcgccctctgaagcgacagaagtcggcgtctggcgagggagacgactctcaagctttcgagcagaacggggggcagggggacgagaaggagcaagcgtgtgatgaagaggacaaaggagatggcagtgaagaggcgtccagtgaggcaccgaaggctgggagcccagtcaagccgcgcgttcgaaggcgcgtcttcatctgggacctggacgagacgctcgtgctcttcgcgtcgctgtacacgggcacgttcgcccagacccacggcaaggaggtggccaagtcggtagcacttggggagcagatgatgacatttctgctcgcaatgctggagaggcacttcttcttcagcgacttgcacgatgcggacgtggaccatatcactcacgtagctgcctcgtcgttggagaatgaaactgctgagccggggcaaggcagtgcatctgaacagcaacagcttactgtgcaagagagatatgagcgcatcaaggaaatctacgaacgtcgtggccacgttgatttcctgcatgatgccaacagtgagtggtttgccatccgcggtgctctcgtagccgccatcgacaacttctcgacgggctggctgcatgaagcgcgacaggtgttggagctgattaaagactcggcacagtccagggcggacttaccgcagcctgacgtggaagcaggaagtacggcggaggataaagagacagacgaggaggtggagaacgtgaatgtgctggtcaccaacacgcagctcgtgccagcgttgtgcaagtgcctcatctatcagctggacgcgttcttcccgatcgatcgagtctacagctcggcgaaggtgcacaagtatcggtgttttgagactatcatggcgaagtatgaagcgccagacgtggagtttgtcgctatcggcgatgggcttgaggaggaacaggtaagtctcgcactcggcctcgagttccacaagattcgctctcttgtggacctcaagcgactgcgatacgacttgcagcttgttcaagtgaacagcaacagctcgccttcttccgctgcagtggttgactctcctgctgtggttgcagcgcaaatgtcggttgcctcctcccccgttgagcaaactgctgtagtctaaggcggccaacgccatcttcattttgctacgtattctcggtgaaatagcaagcattatttattgattcgaagcatgttgctctaccgcgctgcctcactgaagctttccgctatcggcaatagtgcagggcacgcaaggtcgctcgtgactcgtttccaagccgccgatggtcatgatagtacgccaaccactcacgactcgtccaaatgcaactgaaggtcatatccatgcatacacacgtgagttcgcaacatatgttaccaagacattgctactattgttgtacctttgcggcggtcaagccatggctggggtgccagggtgatgaagaattgggatccgttcgtgtgtggtcctgtattcgccatggactgaatgccaagaccatcaaagtcgtcatgagaggcgtcaaaacttgcagatacaatagacagcaaaaacgtacaagaatgccagccgcgttgtgtgatatggcgaagctctcgtcggcaaactcgagaccgtagagggaccgacaaggtccgtcccctcggccattgccgccgacatctcctgcttgaatccaaccaccacgcacaatgcgatggacggcgttgcctctatagcctaattgctgtgtttcatcgccaatagcgggaaccttgtgctcacagaacgctaggaaattcttgcacgttttggggcacacgtcgtggaacaactcgagctctactcgaggcagcgccaccccatccacttcaaagaccaagaaagcgaactgatgcccggactgttcgcgatgccgagccaaagcttgctgtgccgcttcctctgcctttgtctcgagtgtttcctctgcgagtgccaatttctcgctgtactctttccgagcgctgtcggagccttcactgtcgttcccaaccgcaagaacgcccccgaacgcggctgcggccaacaattcgtttctggagagttgagtccgctccatcgcaaagtcgagcaactcgtcttcaccgtccagcatgtcatttgaggaatccagcagcagtataatcggacgggtcgtacgcagcaactcagcacgcttggctttggggatcttctcctgttggttttgcaaatactcgagatactcgatctccatcatcccttccagcggcgatacgaagatcgggtgcagctttcgtagttcttggagcagcattcgacaacgctgatacgcaacgtctcccatgagacccaccagctcacagcactccatgccagctccacctgaagacgccatgtcaatgcactactcgcctgcctcaaacacgcaccgttgcaaactgacatccatttacgtccgagcttaaacgggttatttgcggcgccaaacaagggaataacaacagcaacgtcagcccaatcaagatacagaccatccagcggtgctcattttcaattttgatctcgtatatgcttgactaggtcgaccattcgtactggtatcgactcttgatagcattctgaacgaggtagcacaaaaatgtacaccagcgccagatgacagtgaccacagctttaccaacttaaaccttgctgtagtccatcttggattcgagcttcttcgtctcggcaagtttccgcgcggccttcatgaagtcctcctccacaacgtactcgcggtcagcgcggatagcgaacatacccgcttcagtgcacacgttacgcatatcggcaccgttgaagccgtctgtgagcttgacaatggactcgtagtcgatctcgcccttcttcgtgatagggcccgagtgaatcttgagaatatccatgcgcgaggcctcgttcggcagcggaatctcaatcttacggtccagacgaccaggacgcagcagtgccggatccaggatatccggtcggttcgtcgccatgaccatcttcacctgtcccagtgcgtcgaaaccgtcgagttggttcagcagctccatcagcgtacgctgaatttcacgatcagcggacgtgccctccgagtaacgacttccaccgatggcatcgatttcatccatgaagatgacgcacggctggtggtcgcgagcatacccgaacatctcacggatcacacgggcactctcaccaatgtacttgtccacgatcgcactggccacgaccttcaggaaggtggcgttaatgttgcacgccagcgcacgagccagcagcgtcttaccggtaccaggcgggccgtacagtagcacgcccttagggggtttgatgccaacgcgcaggaacaactccgggttggtcagcggcagctcgatgacctcgcgcagctctcggatctgctcgttcagaccaccgatgctggagaacgacacgttgccggcgtcctcgttcagcatgtggtacactgtggggtccacctcacgcggcaggtagcgcatgatggtgagcgtggtcatgtccagcgccactcgcgtgccagacttgagcttgctcttgtccaccttggcgcggcaccccacgacgtagcgcgggccgctcgacgccttgacgatgaagcggtcctcgtccagctgacgcagcacttcgccgataatttggcccacgctctgcgcaacaacagcatcgtcagtcaagccagaaaggtcgagagacgcaattcgaggcgtaattccgcacctgcagcgccttgaggtcgtcttccgtcttgttgaactccttcacgagcgtcttgacattctcgcgcatgttcttcaccctggaatccacaggaaacaggcacgctatcgtcagtaaagccgctggaatcggtgaagatgaagcaaaagatcgcgacgcgttgacgcgcgatccaagacgatacatgcgctaattccgacgcgcagagcacaatacgcacctgctctccatctcgcggtgctccatgaccttggccttgtacgcgttgagcacctgcgtgcgctcatcttcggtcgggacggacgccatcgtcgctcgctccccttgctcgacttcttctgctctagcctgccccctttttggatacggggattttcaaccaatcccacacgattacatatctaattggctaaaaagaaaaaaaggttgtacaactcctgatacctacgttaaaggggcacgcagctgagccgagagcgcagagtccagcgtgagcgtctgccaggttgccatctcctcacattctctctctctctccagcttcgccagcctcgccatggatcgcttcctccaggcggcaggccgcgtgaagcctttgtcgcgctgcgagcttggtccgacctccttgaagcagtgtctgacgctcacggatctggtcgcctatggcgtgggctgctccgtgggcgctggcgtctactcgctcgtgggcgtgggtgcccagatcgcggggcccagcatctcgctgtcgttcctcgtgagcggcgtcgcctgcatcttcacgtcgctcacgtactcggagttcgcagctcgcgtgcctgtacgtagcgtcgtggcctttgggaggggtagcagtgagactgaatgtgtgtttggatgaaggtcacgggctcggcctacacgttcgtgtacatcactttcggtgaattggcggcgtggctcatcggctggaatctgacgctgggctacggaatctcggcaggtaccgacagcggagagttgacgatggcgatgctgcagtattgaagagagctaatcgtgcgttgtattggttgcagctggaatcgcgcgtagttgggcgtcgtatgcgcacttgttcttgcaacacgtgggtcttcatcttccgcgttggctcgtgcaagcagagtttcttggcatgtcgtgtagcatcctggcagcgtttctcatcatttgctgcaccttcatcctcctcgctggcgttcacgtatgaccatgatgttgctgacaaaaaaatcgttgttattgtgtggagatgctaatgtttgccattgttttgtcgtgcaatgtataggaatctgccagatttaatgctttcgtgacgctgctgaacatttcggtgctactgttcgtggttgtatttggaagcactgaggtggatacgacgtactgggagccgtttatgcctgccggagttcacggtatcatgacaggcgctggtgtggtctttttctcgtacctgggctttgacatggtggcgtgccttgccgaggaggtgcacgagccccagcgcacgctgccaaagggtatcatcggctcgctgttgatctcgatgaccatctacgtgagcgtctcgctcgtcgtgactggcatggcacccgtcgatgttctcggtaacgaggttccgcttgtgaatgcgttcacgttccatggcgtaccgtgggctggacgcatcgtgtcgttcggctccatcttcgggctcaccactgccgccttcacctgcttgatgggtcagccgcgcattttctaccaaatggctaaggatggtttactgccgtcaatattcgccaagctgcaccaccggacccacgtacccgtggccagcactattttcacgggcatcctggttgcgtccattgcgttggtgtttgaacttgatttcctggccaatgtaatatcgtgtgggacgttgcaagttttcacctttgtgaacgctggtgttcttctcctgcgcatgcgtccaagtctcggtggcgctggtgttgtccaccgcgtccttctgtacgtggcgtcgtgttttgctctgtcgctgtccttcgtctttgatctcccgtggacgattcaaggcgtgttcgtcgtgatggtgattgcttcgttcgtgtacatctaccgactcggaaaactcaggtgcgtgatactgctatcgtttgtgcgaattgatgaagataattcaactcacgaggatatcacttgctgtgtatttgttactggaacagtgatctgacaacctcattccagtgcccgttggtgccgctggtgccatgtgcgggtatcctagccaatgtatacatggtggcaagcatccctggagagggctggtacgtatcctgaactctttataggtttggccgtggccagcgaagctaaactgtgctaaccttaatggttgcaggatcggtgtgcttatctggctgggtgcaggggtcgtcttgtacttgtgctacggtattcgccacagtatgctgaacgatgcggacctgctacaccctctactttgagcacgaacgcacgtagatggactgcatgtaaaaccaccggacggtgagcacactaaatgtatccatctagcaccacttcaaccttcccagccaatcgcagcgcaacatctattttcagaagatggctacatatctaaatgagcaacagtgcattagtggcccgcacaacgcagtcatgcatagcctgtcggggtcgacgccctcagcagtggagtgtcttctgcctttccagctaccccggcccgatagtaatgaggacgatccatctgacagatacaacgacatcagcctcgaaaatccctcgaccaggtcccgcgaagaaggcgacagcatgctggagctgtatcgtcaggccgtaccgctcgtccagccgcactcgacagcagcgatcaaaacgatagggaaaattgtgcgcgaccgcgagctagtgaagcgcatgctgcaacgcccacaatcatacgccaagcagcttgatcgacgtccagttacgttcgaaagccctgccccaggatccacttcgctatcagcactgccaccatccacgttaccattgtctccaactgagctaatattcggcacaaaccaaagcagcagccatcgccgcgttatttttatggcagcgtgcgaaaaactcatggtgacgtttgacccgcaagtgcgtcaaacccgacgactgaagcttgtgcagattaaacctttgctacattttcatggcttggaggttagcgatgcagcttttcgtcgatgggagcaacgtctgccgccttcaagtacttctgaaccgtcgacgatagcaggacctacggtctccgtgagtgacttcattcacgggtgccagctctggttcaccgagacattcctcattgagcacgtacgagatctcaaaacctggcagaaacagcagaaagcaatgaaagcaggcaaaaggaagggccgaaagttatcgccactatattacgacgagcaacagtcacccgcacaagccacccagccaccatttgatcgacttgcccacgaaagcgctgctacaagctcattttcgtatgaatcttacgctcgccagccacccccaagagctgcttccctgaactcttctgcttctgccccagcactcttgcatgcgaagtattgttcacacagcaaacctgaccccgctactctcgccgctgtaactaagctcaaaaatgccaagctccagcaacaccgtaagaaaaaggaagccgaggcgcgagttcgacaagcccgacagcaaagcactgagatagcgcgtgcgttcactgcgagtgttgcaatgatctcacgacacgtgcacaacgaagaagttcgtggtcaccgcgacaatgagcttgacatgcaaatagctcgcaccgatcagattcgccactggaaccaactccacaaagcacattgtcgggctgttgatcaagacgcacgagcacagagggctcgcgaagtatgtgccatgaaggctctagcagaagaagaacttctcttaacccgcgacttccgagcgcttcgagaggaggtggtgcgccgcaacaagccacttttcgcaatgtcatcctccacgagcacgatattcccggctcctcccgaaattctggcagcgcgcgccacggccagcacccaggcagaccaccgacgccttgctcgtgtcgaacgggagcatgctgagcatatgcgtagtctacagctcctcgactatgtgtacgaccggaagaggatgatggccgatgcgctgcagcctcgtgctgactccgctctagttgaagtggacgtcccagatgaagagctcccggcagaccgtgtggtacaactagcaggtgacgagctctggcagcagatcgtccggctacatgaacaaggagactccgacagtcttgctttgctggttcctcctaccaactcgccaccggcagctctgcgttacttcgccaccagtcgaccaatatcgctaccagccttcgcttcaactgtcgaccgcaatcttcaataaccaaactggcaagaaacatcgtacatgaagcaaaaacgtgaatctatttggcaaaacaaagctccgtgatacctggcgcccatgctctagccttgacgagcaccacaggcatggctccaagctccagctatttaatgagttgcgcccttgctcatcttgtacttcttcttggcaatcgttttgggattgaagtggcccttgcggtgctgcttcttccatttctgacgcccagcagtactcttgcccacgcccgagttgccgtagctgatacgatcctccacagtctgcttcttgtcgtcattggcatcaggagccacgaacgtgtgcagcgggtcgttgtccgtacggcgcttgccgtcggcgaggcgctgacgcttgttgtgcttgttgtgtttcttcttggtacgcgatggtgccggcggctgcagctcgataggaaccaggtagtccgggatggtagccaaatggggctggaccggtgccgaacccaccaccttgtcgtgctcaagcatgttcagatcgcgcgggttagcctggaagtgtgccgccaggcgctccgagttgagcatctccttcttgacatcagccagttgtgcttcgcgcactgccacacgcgtgacagcacgacgaacgtcttccacgcggtatcggaagcaatcaatatccttgaggtcaaacgcaagctcagcgggctgcgcgataacatcattcgactcggaacggacagcctgctgcctagcctggacgcgcttcagcgcacgctcttccttcgggtcatccttggacaccagcgacagcgcagtaccagaggcgccaccacgcgcagtacgtccgatgcggtgggtgtaggcacgcacgctcttcgggaagtccacgttaataacaaactgcacaccgcggaaatcaacaccgcgcgacacgccgtagccttcgtcagcacgaccacgcttggagcccactgtcttcttttcctgcttctgctcctcgtcatcctcctcgtcatcatcgtcaccgtcgttttcaggagcctcttcatcactgtccatggcttcgtcgtcttccttctcgctgccctcgtcgtcgtcgctaccgtcgtccttctcctcgtcttcctccacagcttcggactcgacgtcagacttctcaccgtcttcctcctcctcctcttcctcctcctcctcgtctccctcctcgtcaccgtcctcatcgtcttcatcttcgtcctcgtcgccgacttcgtcacggtccacactgtcgtccgtagcgatgaggtagtcaaacaggccgcggttgaactcctcaataatgtgctgacgagagttgtgcggcagctttgcgttaagcacggcgctcttaatcacgaactgttcgaagaaaagcttgagtcggtacgccgcgtccgtcgagttcacgaagaagatgaccttgccgctcaccacaccaagtcgcagcagcgcgtacagcagcagatccttgtcggcgggcttcacgggcaggtagaactgctgcaattttccgtccgtagctccctcctcgagtttcaccacggcagggttgtgcagcacggagcgcttgagcttctccagctccgggctgagcgtcgccgacatgcagaacgtctggcaggccttcggtagcgcattgaagatagtacggatgtcctctccgtatccgaaagacagcaccagatcggcttcatcaatgacgaccgtctgcaccgagtccttgagcgtcaaattgccagcctccaggtgcgccacgaggcggccgggcgtggacaccagcacgtcgggcgcgtcacgaagcagcgcctgctgggcgttcatgctctggccgcccagggccagcagactcacggtgtcctggcagtagtacatgagctccatcatgtggcggcgcgtctgctccaccagctccttggtgggcaccagcaccagcgcgcgcacgaccggctcgctggcgggcgcgtcctgcttgtgctgcaggatcttgtgcagcagcggcagcgcgaaggccgccgtcttgccggagcccgtgcgcgcgcgcaccagcaggtccttgccctgcagcgccagcgggatgcagtgcacctgcaccagcgtggcgtgcacgaagcgcatcttggccaccgccttggtgaggcggcggtccaggccgaactcgcactcggcgaagggcttctgtccgtccagcagcgtctcgctcaccttgggctgctgcgccatcttgttgccactcactcaactgctcaatgcgctggggtcgagcaatgccgcttcaaagcgttggttggtcggcaggtcagatggtgtgtcgacacaccaaaattattcattggtgtaacaccacacaaatgaggcagcgcctgtacccattttgcgtcattgagtacacgaccatcactctgacttctcgcgcgcgattttgaatcgaattcaaacggaacccgcactctcccagcggcagtcgacggccagggatgacgacgacggacgccagcagcgagctccgacgcatgtcgtcgtgctccgtgtccagcaaccacgacgcgccgccgcctccccccacgcccacgaacgtgcaggtggcggtgcgctgccggccgctcaacagccgcgaaaaggccgcgggccgcggcgccgtcgtgcagtgcaagccccactcgagcgaggtggccgtggtcaagcgcaagacgtacacgttcgaccgcgtcttcggccagtactcgacgcagaaggatgtgttcacgtccgtggtgcgtccggcggtggacgaggcgctggcgggctacaactgcaccgtgttcgcctacggccagacgggcacgggcaagacgtacacgatgcagggcgacctgtctcctagcagcgagacggcgggcgtcatcccacgcagcgtccgctgcatcttcgacgcgctggaggccagcggagaggagttcagcgtgcgcgtgtccttcctgcagctctacaacgaagagctcaaagatctgctggaccctgacacagacaagaagctgcggctcatggaggacgccaagcgaggagggatctactgtatgaacttgctcgaggtcacggctaccacggccaagcacgtgtacgaactcgtgaatactggcgtgaagaaccgcatcacgtccgagacgctgatgaacgagaactcgagtcgttcgcatagtattttcaccattcgaatccacagcaaggagcacaacgcgccgggagaagatttgctgcgtgtcggacagcttaatctggtggatcttgctggatccgagtgtgttggccgatcgggagcgcgcaatgccagagcgagagaagctggcactattaaccagagtttgcttacgttgggacgcgtgatcacggctttggttgacaaccttccgcacgtaccgtaccgtgatagtaagctgacgcgcttgctgcaggaatcgcttggtggtcgagcaaagacgacgattattgcaacgttggccccatgcgctgatagtcttgacgagacgctgagtacattggaatatgcgttccgagccaagcatatcaagaataagcccgaactgaaccagaagatgaccaaggcggggctgttgaatgactttggaagcgaaattgaaaccctccgggcagctttgcgtgctgccagactgaaagacggcgtttatcttccgctggagcagtttacggatatgcaagaaagattgggcggtcagggtgtccaactgacggagctagaagagatgctcaaggcaagaaacgcttcttgtaaagagcttgaagaagctgctgaaaagcatgcgagtgaggtcgctgccctgacacatgcaaagcaagaggtgagcaacaaattgactgctacggaaggcgaacttgctactacaaaggagacgctggagaggacgacgcagaagttgcagcaagtacaggcaacactgaaggcctatcaggaaaacgagcagatgctactcgataagggtagtgctgcagcgaagctctacactgacagcgaaaagcgggcggcacagctagtggcaaagattggtacgtaactgttttttctctttctggcttcgctgtcggctaacgcgtttgctgtcatttcagaaaacacccagcgagcagatgatgcaaacacatcgctagcgaattcgtatcgaagtgagtcacagtcgcagattcagtcgttcctgcaggggttggcgaagcacaaggaaaatcaagaaggagtgtttcaagatgtatcaaatgctttgcatgagttgcagacggctcatgcggcggacttggatggcctattaacaagcctaaatgcactgcaaggccttgttgaagcgcggaaagctcaggttagcgaatcattcgctgaagatgatgtccaaaagcgagcccagcgtgacgaagtgaccacaacagtgaaaaaacagcaggaacgtatgggaaaacagctcgaggaactggttgaaatgtccaagaaccacgcagcagctattatggaagatctggctacgtctaaatctcaaagcgtggcatttctggagagcatgcagtcggcgatggagagttcacgcgaagagctgaacagctttctgatcgagcagagtgataagctgttagaattgcaggttgcaatcgatatgtcgatcgaaaaacaaatcaaggagcttgacgaaagcaaggcggcactgacggcagcgctgaaggacaacaatgctcaacaacaagaggagctgaatggtatgaaggcacatctggctcagtacgtcgagaagtgcattcacaaccagtcacgaaagcttgaagagcaaacaaagcttatcgaaaggagcacgatgaatcagcagaagcagctctcgcacgtccagagcatcactgaacaagaaatgaaggcctacgttcaggctatgggcaaccagaactcgaagcacgaaagcgatatggcagggctccgcgaggacttgtccgcaatgcgagaccaacttggtgacgcgaacgtgcggcaaagagatctaatccaatcacacgagcagctgcaaaggacctggggcaacgaagttactgcgctggctaaatcgcacacgcagggtatgacgacgcttatggagaatcactcacaagcagagatcgcgatatctacgaagaaacaggagcagttgactcagttcttgagcgatcacgaggacctccgccagctattgaatggtggatgcaagacgttggaaaaggggcttcaaacccaactttctcacactagaagcagggttgattcagcatctgctcttggtaacgagattgtcggtgcagccaccgaggcgtccaaccaacaattgcaagcgatggaggagtacatgaagaaacggcgggtaagatggctgcatttatttcttcggccctgtaaattataaattgtcgactgactggcgtttgcatgttgcttattgtctgcagatcaatactcggacgggagcgacaccgatgaagaaggacaatcggccttttccaactttcccggctaccaaggttcccgtcgatacggagaagtccgtggagaatacatccagcttctccaacttcatggaaaccgagagtttatctggacacaagcgaaggaggttaagcgatgccagtcccattgccgttgacgatatgacggaagacacccccgagcaaacggaaagtgatgcccccgtgagcgccgagactaccgagactgctaccgctaccgctagcagctcattatctagcagtcaagaatcaaagaatcctgacccggtgtcagcagctgatgcttgtagaacggcgaagaccccaggacctccagtcgagaccaaaccttccgctgctgtcaataccacgccatccaaaatcaagcccagcgctgcagctaacaccacgccgtccaagatcaagcccagcgctgcagtcagcaccaccccgtccaagatcaagaggacagggtcgtctgcactgcacaagaagcccgcagtggcccatccgcataggaccatgaaggtgcccagcacaggcacagcaccacgcaagaccgccaagacgtcagcacttgcggcaccgaagcggtaccgcgccaagtcgccgctagggtagaccacggcctcacgttagtcctgtaagcttatccgctccaagcgagtgtgtcaatttatcttgatgtgtccaagcaatcccatgcgttgaaatgccacccaggccatgaagggctgcactgagtcagtgccactgacgcagttgaagtggtctacccgcccgtgattggctgaaacccttgatgagtgtgctcccataacggtcgcgatccgctcatttgacatctggagcgatgccgagcaaggaggcgtggaagaaggcggacatcgccactgcagcgggcgacgtctccgcgaagctgccaaagggcaagcggcgctatgtgacggccttcctgtgcctgtgcgtctccacgatctgctacgccgaccgtacgtgcgtcttatgtgtgtgagtcgtgctgcacttgcaaagtttgactctgatttgatgcgcaggaaccaacatgggaattgcactgcctgcattcgtcaccaacaaaaaggagcagggagaagtgctctccgccttcttctacggctacatgtgcacccaagtacggcagcacgaaaggttgaaacaacaaaacccagcttctaaagagattctgctgttgctgtagattccgggagggtactttgcgaccaggtttggtgccaaggtcgtgctgctgaccggagttgttgtctggacgctgtttgtacgtggcgacacagatcggtggtctatgggaggggatacagttctgatgacatcgtttcttttgcgtcaatattgcaggacgtatctacggtggtcgtggccaaatgcctcacgtgcctattctttacgagagcgggtatggggctcggagagggtatcctatttccctgtatgcaccaaattgccggcgcgtggtacccggtgcaggagcggagtcgtctcgtgtcgctggtggcaagtggttcggacttgggcacgatctctgcgctgctcatttcgcctgccatcatggcggcgagcgggtggcagcgtatattccttgtgtttggtgcgctgagcttcatttgggtcgtggtatactcgatcatgggagtgagtcgacccgaggaggacccgaagatcactacagaagaacgcagtttcataattcgcagccgcactgtggaccccgacacgcacaggcgccagagctcgcgcgctgagttagacacacacgctatgaactggcgtgttctgctgacttcgcgtcctgcgtgggccatctacgtggcacacatgtgctacaactacagttggtacattctgttgggctggatcccgcagtacttcaaccaagtactggaccttgatttggccaagaagggtgggttcgctgctgcgctgccctatatgtgtggctacaccggcacgctgttgtttgggcggctgggagatctgttggtcactcgcgggtaccgtgagttgcacgtccgtcaggccatgaacgcgttttcattcctcggatgcgcattcttccttttttcgctgcgtctggcgaagtcggcgccgatggcggtggccttgctgtgcatgacactgtttaccagtcgcgctgccatggctggctactgggtcaacatgatcgatgtggcaccgaaccacgctgcacatgtcatgggagtctccaacaccttcggaaccattccgggcattatcggtaatgtggtcactggagctatccttcaagctacggggtcgtgggacctcgtgtttgccatcgctgcactggtcctcgtctttggtgcggctttcttccactgctccgcctcggacaagtccatctacgctcgacccagcagcaacagcaatggagaaggttacagcagtgccagcactacgtcgagcagctttcctggaagccccaactacggtttgtctctgtcgtcttcgattcctgagctgcgcgatgaagaggagagcctgcttgaaaaccaaatgtgagtatgtacatgttcacttgtagcaatgatgctgggcggatgcatacaggtgtgaaacaggagactttggcatttaatgatcattttggcgcatcctgtacctacctaacgctatcttctgaagctggtgatgagaaatctcttcacttgggcaattattttgcatttcgacaaacagatcggtggcagctacccagtatttgcgctgttgctctgcgtagattcgttggatgtagctctcagcatcaggaaagacgcggtaagcgctggcatccagcatagtggcgaatattggagggacaagctgtagttctccatgctgggttcgctttacttcaatccatctatttgtacccaatttcgaaccatgttcgcatgacaggttgcttgggaagcaacctacgcagaagcaagcaaaagcatgcaggaagcgcagcaggtaagcgacgattgcgcgggatagcaacccacagaggtatcgtcaacaaccaagactaacagaaaagatgttttgtaattagaaagaagacgtggcgcggaaagtgtggtttcacctggtagatgaagctactggcggcgcgttcttgcatcacaaggtgtcatctgggtcatctggtggtgtctgcgatatcgacgacctccgcaagaagattcgcagtaactatcggcgcgaagaaccggatattctggctcacattgtggtcaaccaattggatgtctatgccaacaggaaagcattcgacgatgagaaagcgcagcctttggatccgaggccatcgttgagtagtctcgatgcgcaagacacgcaaatcgtggtagtgccgacgcagcatcttgttcctcgcactgtagcaccagcggccgaactgatggaaattccaagcaccattggcctcactgacagaatggaccattagcgctgtgcacgagattccattgatctggcagtttatgagctgcttgggtgggtgtaccaacaacggaaagatgttttggcgattggaagacaagcaggtcgcgtcgatacttgttgatggatggtttcgaaagtctacggatggcaacatcaatgttcgcacgaacaagaagagcatcctcatgggatcaccgggtatcggcaagttgacgctgctgtgtgtgatggccttttatctcgtgttcaagtacaagaagaatgtgctagtgtatcgacgattggccaagcttgaacaggaaaactgtcttttctacctgggctacgaagatggcaaggtcgtgcagtttgctgtgcagagatgcaaagcgccgaatgcgatcaacatatatgaagagctcatccgccaacagggcgtatcgaacgtatggctgttgttggatggatttcgttaccaagatattccggaaggtgtgcggacgttcaagatgctgacaacgtcgcagcaagtgaatttgaagtctcaagaacgagttgatgcgtactgctgcctgttgccttgttggtcaaagaaggatttgtggtcaactttgccactaaggatatggaagaacggttctactactctggcggaagcgtgcgtgaatttacacttgctacatcggaggacgtacgcagtgcaattgatgatgcgatcagtggtgtggatgatatctcaaacgtactctcgaacaactccggtgtattgacgggatcgcaagttgatcgattgcgccatacattcgtgaaagatgctgatgacacaaatcattttatcgccaggcgaaattggaatatgccgttcttacactctctatccggctgcgatcggacgcgctgtttcgaatctatgcatgggctcgaagcaccggacatgaatcacttgaatacgatccactgacgtataggaaaccagatgaacctcgtggttatgaattcaagcccgtgctcctcaaaaacggtactgctgttcaacggggaacctaaagtgagtataagccttatttggaagaatggcgggacaatgacgagctcgcgtattggtttcctgcgtgcgataatttccccaatattgacagcattgtgaagcttgagtcaggcggcgtggcgtaccttcaagtgactgtcgcagaacagcatgccacctgcagtactcaactgaaagagatgcatgcgatattcggtctcgcgaattcggccaagccaccaatctacataccgatttgtcccgaccgaaagtcatgccaagagtttgttctcacctcgcgcactgaaactttattattgacgtgtcaagtgtttgtgggctactttgaggagtatcagctcatctgcggcagatggcccgaagaacaacttttcggtgaaaccagtccctcccgagcacacatacaacacaacgtacggcgtcgatgtgctaaccgaactctttgttctcgacttgataaaacgatccccccaaagtgcgtccgattcgaagatgaaaattcccgaattcgcagttcgtttagaactgtcgttacatgcaagtttttgtcagataccggtacaaatcaatttggagtgacctcgtgtttgccatcgctgcactggtcctcgtctttggtgcggctttcttccactgctccgcctcggacaagtccatctacgctcgacccagcagcaacagcaatggagaaggttacagcagtgccagcactacgtcgagcagctttcctggaagccccaactacggtttgtctctgtcgtcttcgattcctgagctgcgcgatgaagaggagagcctgcttgaaaaccaaatgtgagtatgtacatgttcacttgtagcaatgatgctgggcggatgcatacaggtgtgaaacaggagactttggcatttaatgatcattttggcgcatcctgtacctacctaacgctatcttctgaagctggtgatgagaaatctcttcacttgggcaattattttgcatttcgacaaacagatcggtggccgctacccagttctcacgctgttcctctgcgtagattcgttggatgtagctctcagcatcaggaaagacgcgataggcgctggcatcctgcatagtggcgaatattggagcgacaagctgatgttctcctgcatggttgcacatctgcatgactcgattaaacacggcaatgctgggcggaataccaaacattgcctgcatatcgggaagcatccgaacagcgcgacgccattcgccgactttctccaacgagtccaataactgagtgacgacaaaaactggcggaagttggcccgtcgcggtgtgccacttgtgaagcagtgtcgggacctcgaccacgcgatccttgtcctccaaagatgtgcatgccacaagatacgctgaaaagcttgagtcgctcacgagatcacttttcagctcaacagatttcttgtcccgcttgcggttgataagggtgtcaaaaatggtaatgacaccctcgaagtcctcattcacactacacgcagctatcgcatgctcatacgtcgtcatgtcaggcttcaatcggttctgcttcatttcctccagaagctcaataatgcttgcacgagcccaagcagcgttttcacgctgttcataatcgtagtagtgcggtgactccactgcgaaatcttcactagtctgggcgaaagcttcatcgctactgtgaagctcgtcgctcagttgttcatcaccatcctcgtcataatctacgacatcatcgtcttcctcccagttgtttctgttcttcctccaccacgcagcccgctccccagctctaacgaaagcttctaatgctgtgttgtaagaaatgatgtcggcggtcacggcacgcttacggcggatcacatccagtacttcaagcgcacgtccaggaagtgccgcctcggaacatgccaacaggatgcggttatagatacttacagaggccctaccaagcttttcttccatctcatttgcgatatcccaggcactagatacatttccaacgcgagcatatgcgaacaccaatggctcgtacgtttcgatcgtcggagtaaatgcgcctgatgtctcaattgcacggaagagctccagcgcgccatcagggttctttgaatttgcacacaattgcatggctccactgagtaccttcagagtaggcttataaccatcggcagccatgatgtgatccaaaaagtttaagcccacctcaaattgctgttggcttgcgcaggtcgcgaacatcagccccaatgtcgtatcatccggttgaatcccacgtttcttcatcaagtcaaataaagcgaaagctgcatccacctccccgaggtggtgataataagcgaacgcattgttaaacacgccgacatcaagtgagctgagcggtgcgtcacggcaggtattggtgataaactccgccatccacgccaacatttccaactcttgtccgtcgatcacttcttcatcccggtcctcgccgcctagcaggccgtcatcgacatcggtattgctgttttctggactctccaagaacgtagaaaataaccggaagagcgaatagtatgtcgcggcccctgaatcgactttctggtcttcagtgcaccattcaaagaacgagagaccttccataacaattttgacccgagcgcgtgcatccctcccactactctttaaatttgcggtgtgtgccttgagtaccgtgttcatagtcacttgatcgggtagtaaatcactttcgatcatctcgttcaaaattgaatctatttgacgagcatcaccacggaccgcacaggcattcaaaagcgcattgtagctccacgtcgtcggtgtgcactccggagaagacacggcgtacttcttcatttttgtaagcacagacaccgcttcactcaggttcccctgtctcccacaagcacctaaaacggcattgaaatctgctgcacttgcgttcttggcgtgaatgatctcgtccagtacacgtagtttgccatccaattttagagaaagcctttcaatcgctcgatccgagctggtgggcaactgcatgcgctccaacgagcgctctacactctctttctggcttcggttcagaaggaatgcttcctggtctgatcgcgccatccgagaccaatcctgttcgtccagtgtccacacgactgcattcgatatcgcgtcacgctttgcaaccagctgctccagcgatgcagtgtcttgcatatcgctgtccccagtagcactttgttggctccttttcgcgaaggccaaggcgtactccaccaagttccattcgccacgctggcggcaactatcaaccaccgcattcacaacttgccgccgcacaggcaattctatggagtcttcaaggggaaatgctctctcaacatcacgtagaaattgcacagctccgtccacgtcaccttcacacagtaggtagtacaccattgtccttgtcgttacagtattcgggacaagaccgaattcatcctgcgcacgcttaaccagatccagcatcaccgtcgaccgtccacaatcacgagagtacacacgcagcattgcattgaccgccagaatcgtcggtgccactccatcacgcatcatctcctcaaaatactggttcgcgagcttcactaatccttgcttcctcgcacaacaattgattaagaacccgtagatccttgcatcaggcttccttccacactttcgcatcttctccattacatgtctcgcactgcgtagatggcgtgcgcgactgcacgcagccatcgccacctgaaagctcgtttggtccgcacagccctgggcaaccatagcgtcaagcagggccagaatccgagtcaagttggcgttcatcagcgtcttttgttgcttgcagtagtgccgcagcatcaggttgtacgtgtacggccacagcaccgccttgtccgggtgccggcggagcagcgtctccacgatggcccaagcgcggttgaggtcgctggtttccagtgcctccagcactcgacggttgtagaacctcctgcccctgtctgacggtaaggacgcctccacatccttcacagccgcgcgtagtcgccacgacggcttggacgcctccgatagtcgctccaacgccgtctgaggacctgctgaccggtcgttcgaagccaatacagcgaattggcgcgcacggagacctgcaataggtagcacggtgtcttgtgtagcagccgaagctgctcggccgagcggagcggtctgtatccgacggagaagcgcgcgctggaacgccgccacctgcgccccagcgaccattttgcaccgttgagagcggatgaggttgtctgcgccgctattggtgcaaagtccgtttaacatcacttcctcactttcttccaatcacatacgaagtggcatttatccaccctgaatgatggtcttttccattgatttctaccaatctcatagcttgactagcatttaccgcctttccgtacaatttgaatcgagctcttccagcagagagatgctgcggcgacggcctgctggaggcggcggcggcgccaagttcaagccgttcgtgctgcccgtcaaggcaaagcccacgcgcactcagccgcaggatgaagacaacgacgcgtacgaagacgcggacgccgccagcaaccgccaggcgctgcgcagcggcgggtcgctgtccgtcaagcgcctgcccttcctgtccttcctggtgatggagcccgagcgtcgcgctcagcacgtgcggcgccagttcaagtctccgtgtggagagggaggccgcacccaggagagcaaccgcctgctgcagaccaagacgctgggcatgcggcggcgctggggctcagcgctgaagcccatggtgcgccacgacctgccgcctgttgaagtggacgtcgaggaggtcgagacgctcgtggaaccggagcctccagcagtagaagaggctcctgttgctgctgcgccagcggccgaagcgccgccgcctctcgtgctgtggcagagcgaaactgacccagagatcaaggtggtggtgccagaaatcgtcggcaagttcctgcgtcctcaccaacgtgagggcgtgcagttcatgttcgactgtgtgtgccaagtcaggggcttcgacggtcaaggatgcatccttgctgatgacatgggtctgggcaagaccttgcagagtatcacgctcatgtacacgttgttgatgacgggcatggacatgcagccaactgtgaagcgagctattgtggtgtgcccgacgtcactggtgaagaattgggacgatgagattatcaagtggttgcacggacgtgtcaagactgtggcgttgtatgaggcgaagcgtgagactgtgatcaaaggcattaaccagtttatcgaaggaagcaagagaccgagaccaggattctcggcacaggtactgatcatctcgtacgagacgttcagaatgcatgcgcagaaattcgcggatactccagaatgttgtgagctgctgatttgtgacgaagcgcatcgactcaagaatgccaactcccagattaacaaggcgttatcgtcgctggcgtgccgaaaacgagtgctgctctctggtacaccgatgcagaacgatttggaagagtttttcgcaatggtggactttaccaatcccaatattttgggcacaccaagtgagtttcgaaagaattacctggggccaatcttggttggccgagaaccggattctacagatcgtgaacgaggtgtggcacagtcgtgctcggctatgctctgtgaaattgtgaaccagttcattcttcgccgtggtaacatactgaacgccaagcacctcccgccaaagctgatgcaagtgatttgctgtccgctgtctcctctgcaggagcaactctacatgcacttcctttcatcgagtgcgtgccgtgatatgatgaaacgtcagagcgcaaatgttctgtcgtctatcacagcgctaaagaaactttgcaatcatccgctgctgattttcgacgaaatgggtaaaaccaataccaagcttccaggattcagcaattgtgcacaatatttctcagcagcaaaggaatcccgagatactgggggtgataacggtctgcatcgacgaggaggcttcggtggtcgcacttgctatccagaatggtcgggtaagatgcttctgctcgaccgcttaatgtttgcgatgaggaagacaacaacagaccggatcgtgattgtttcgaactacacacagacgctggatgtggtatcaacgctatgccaggaacgccatttgcctttcgttcgtctggatggaaccacctcggcaaagaaacggaagaagcttgttgataccttcaatgatcccaccacgaattcatttgcgtttttactgtcgagtaaagctggcgggtgtggcttaaacctaattggtgcgaaccgattggtactgtttgatccggattggaatcctgcgacggacaagcaagctgcagctcgtgtgtggcgagaagggcagaagaagatgtgctacgtgtatcgttttctggcgactggtacactcgaagagaagatatttcaacggcagctttcaaaggagggcctacaaaacatcgtcgacgataaagaggaagtgaattcgctgtcgtcaaaggacttgaagcggctgtttgtattccgcaaggatacgttgtctgacacacacgaccagctgaaatgtgatcgctgccaatggagaggcgacggcgatgctggtggtgatgccgcctcagtaattacaattgatgacgatgacgaaaatgggaaggaatctggaaatgaaacttcgcctgatcgtagcacaagtgacgaagataatgacaaggacgctgacaagtgttatcacccgcagattggcatgcccccagaagaggatttgaacagctggggtcaccaccgtgcctacgcctctgtcgacgatgaagtcatgcaagccgcacttcagcaagttcagaatgatctagtgagtttcgcgtttagctgtcgtatcgattgggaactactccaggagcaccaggctgaaaacgaagaaaaagagaatcagcgtgatgaagagcgcaagcgcaagcgtttggagatcattgccgcaaacaagcagcgcgctgaaaaggagaacaactcgaagcgttcaaagtcgaaggcgtcgaaagccacggatgggtctgatgagtcagaggtcgtatattcaagcagcagcgaagaagagcacgacgaagttcttggcgaaagtgagtcggagagtgggggtgaaggtgcacgactttccgctccccgacaaagatctttatccgatgaagtcgacatatcgtgcactccaaaaccgccacttcgacgccccccaccagcaaagaattcgttggaagtgtcgtcgcatcctgctcaggaggaagcacctcaagagtctgccgcagacccttctaagttgaagaggagagtttcgtttgcctcgcaagtcgaaagcttcccactgaagaagcggagattcagttcagacttttcagactcggatgaagaggacgccttcgtggatgatgtccttagcgatcaacgctcatctcgtaaagaaaaagtcgtggattcggacgatgaacacaaagaaagcgaggtaccttcggtgtggagctgttcacgttgcacattgatcaatccaagatccaatgcaagctgctccagctgtgggcttcgttatcgtaaaacgcgcccacaaatcatcgacttgggcgacgatgaagatgaggactggtaggaataaggtaatagattgcgttcgttttgtcttctttcttgaggctaactttttgcaggtgccctatcgaatggaagaagtcgtagtgactgcgatttaccgttaacatctcgctaatgctcaacttgctggggggctcttcctcgaccgaggaaacgcttttgcgaccgtcgtggcctcctctcgccgtagcgatgcccagagatcatccgtcttctccgatattttgcctttcgctggttgctcgttttgtgctgcttttgtgtccttccgtgttttccttggcttgcgccttggcttcgtagtggcatgataaaccttttggaggttcatttcgtctgcttgaagggcacgccaagcgctgtctgcctcatcacccaggtctatactggcagagctcgtgctgttgtcaccttcatcgatcgtgcactgctggaaattcggagccaagctctttgcctccttctcttcttgtatacgtcgtcgcagcctctccagcaacgggcctactgaagggttactgggctctaagcgcttcatagcggtcgcgtcctccattgcagactagagtatcgttagccgtcagggtactaccggtcatgagtagcagcacgtgcatcattatcttaccttccagtggctcatgcgctctcgcaccagcgctcggcgataaaacgccttcacacagcatggatccctaccgatcacagcgctgcagtcctgctcagctgccgctagcgtgaaggcgctgccgtcgccttcgggcatctggatccacgcccatgcgcggttgagtctcaccgccgtgttgagtcgcacagctgcctcctcggcagcccctaagcttgccaagccatcaagcaccgaggtgtagacttgaaccgcttcggcaaagcgttgctgctggaacagcgcattgccctcgctcttcttggcctccagcgcgtccatcgccgtcttcccgcacgtatccaaagtaaccgccaagggtcaagttgaagcgagccgcgccgtttcgcgtcgcttgctttcattcgctgaaaaagggagaatgtgcgcatgtcgattggcagattctgagactaatgcgccattttggcgaatcacccagtactgacaccctgacacgcttggtcactatcgcacacattttgacccgatccttagtctaatggcacagacacaccgggcttcgaagtatgctacgatttgtatactactatcctaaatacgaacggattgcttggccccgattttgctgtcggcgggactcgaacccacgctggcgagagacctgagaggcgacccgcttgacccggtcgagccacaggcaacgagtttactcacagatttcagggcatagaggatcaagctgcagcagcatcatcaagaccggagaaggaagacacaccagcgaagccaaatacaaagcgctatttagtagtatattgtgtgggggttgtgcgctcacgacggagagttgaaagacgacagttctaggtacgaggccagcctacgggttcacgatgctcttgcagaacgcctccacgttggcggcgcggctcgccgtgtcgggcgcgtcctcaatgatcttgacaatcttggagccgatcacgacgccgtccgcgagcgcgctcgccagcacgaagtgctggcgggtagacagaccgaaacccagcgcaagcgggtgcttcacattcgcgcggactgcaacaaataggtgacaacagaagcataaaacgtcagcagcgctgcgaaggacaagcttcaagaacagaagctagcaacttactcgtagccatgaacgcgtcaaggttgggcggcaggtcggtgcgagctcccgtgacgcccgtgagactcacgcagtagacgaagccgtgcgccaccgagtcaatgagcttcatgcggtcctccgttgtggtaggcgacaccagcggaatgtaagcgaggccgtgcttggcggcgtcgtcgctgagcggcttggcctcctcaggcggcaagtccacgatgatgaatccatccactccggctgcagacagcaataacctagttagtccgcgtctccatttcatccaccagcagcagcagcgcacagcgcactcacctttctgagcgtcggggcagatcttgtcctctccgtactgcagaatgttgttgtagtagcccatgagcactacgggcgtggtcaggcccttggcgcgcgcctcgctcacggtggcgagcacgtcagtcaacgtgatgccctggtccacacccacctggtgggcgcgctggatggtcggtccatcagcctgagggtcggagtacgggatgcccacttcgatgatgttggcgccgccgcgctgcaggcccagcaggatttccaccgtgtcggccttggtcttgaagccgcagggcacgaaggtgatgaaggccgccgtgttgttggccttgcgctcggcgataacctctgcgatcgtgggtctgcagcaaaataatggcgtgcaatgccaaacgggttaatgcttcatcgtaatgataaagcggtagaagaagagctcggacctgctcatggtgctgcggtgtggtgtgctggctgcgtggagagtctgcgtatgtcggtgccgagagctcaagttggttttacccgttgagcggcgcctattggttgatctcaatttcagccaaacaccgcgcgagaatgtgcgcataatcttgattttgccaacgagacgactttcacccaatccaattcgagagtaaagatgctgtgctgcttgggcaacgtcaacggcaactacaacatcgcttcaaggcaacaaattgcattgagttgataattgtgtctgagcgactgcattttattttaggcaacgcgcgggcgcttcttcagcaagccgttcttcttgggctggatgtggctgcggatgccgcacgtggagcagatgggtcggaactcgcaaaacagcgacaggcacacggggcacacgtacgccgtggagatgacctctcggtggcagaagcacattgcgcggaagtccaccgagtcctgtgacggaagcttcagcagcttgcgcatggacgggtctggcaggtagatcgagatgagatactgcagcaggccgctgtggtcgttgggcttgtagtagatgccgcccgtaagatacgctgcttgctgcatgaacgacgagtgctcgtttgcaaggatgcaggcgtcgaccgcaacgctcttcttctgggccgagaagatgccgttcatgatggcgatgtagtgctccgacacgtccggagacttctggacgaccaagatccgcggtcgcagatccggctcctcgttgatggcgcggttgatgactgtgcatccaagtcacacaatgatgtcaatacacattcaacagcaaaaacgataaggagcgctacaacttacagcaaagagcacgcgacagtgacgcggcaatggccgttcggttgggcttggccgggtcgagcggagcgtcgctcagctgctgcagccgctgcatgacgccagcgttcaccctggcagcctgttcggcgctcccagtcgtgtcgtcctgctctgggtctgggtacagcatcgcgctcttgccagcatgggctgcgatgatcacgatgcggttgctgcggtgcagcagcaggtacgagttcacgaacacgagcgtgctggagatgagctgctgcagccccgcgcggtccgccgcgctgccgccctgcgcgaaccagtgcaccggattggtgtcgatcaccagcaccagcagcccttcgtttgcggtgtcgctgctggcagccccgtcggcctgcgcgttggtgctggccatggtcgatcgcgaatgtggattgacctaaattgctgtcgtactttaacgggaaagcaagagaggacggatgtcatgaaatctcaagccataacttgcgcaggtttgctccggaagttgttttgtcacccctcccaataagaccatggaaaaactataacagctcactttgtgcattagttaccgcggaagctatacgaacatgcttacaggctccagagcatggtggagacgacacccaggcaggcggcgaggctggcggccatgagctgcgacgatccgctgtcagcggtcgtggcgctagacgtcgtgtcggtgttcgacgacgacgtggtggcgtccgaggtgcccgtggttccagtggtaccagtggtaccagagctggtcgtggtggacgtgccgctgccgccgggggagacggtgcccacagcctcgctggacgaaccggagctggtggtggtggagctgcccgaggaggtcgagtagtcgcccgtcttggtgaacttgaggtcggcgtaggccgacttcatggttcccgtctcgtcgaagatgccgaagtgcgactcgaccgtggtggcgtcgtccgcctgcttctccttgtagggcgtgtcgaagcccgcgaagtagtagtacttccacttcttggcctccgccagctcgtaaaagtcgttcaggtagatggcagcgttctcctccgaagccacggagccgttggtggccgtgccgcccgtgggccagcccgtctcactgataataacctccatgtcgccggccagcttgagcagcggctggatgcgcttgttgaactgggcggcgcccttgttggccggggtcttctcccagaaggggaactggttgatggtcacgatgtcgccagccttgagcatgtccgggtactgcacgaacgtgtcgacgatgtccgtgatgctgaccgggacgctgatgtcgttgtccgccatgaccttcctgaagtcggtcacgtactcgatggcctgctcggccgtgatgtcctcacggtagacggcctcgctgccgacgttgattcccacgacgttgctgtcgatgaggccggcgctgatgagctccttgaaggccttcacctcgttgtcgtagaccttggagtcctcggacacccagacgccgagccacacggtgagcgacagcttcttggcggccgtgagcacgcccgagacgtcgcagtccgacagactgtacgtgcgcacgttggacgtgatggtgctcaggaccttgaggtcggacgcgatggtgtccgcggacttgcacttgctcgggtcccagtcggggccctggcgcaggtcgtagttgatgccgtagagcttctggtccagcgcggcggtcgaggatgccagcacggccacggcggcggcggcggagagcgagagcacacggaccatcttggacttgtagagggggggtacctcttgctagacgcacaatcggtgaatgaggcagcatcgaacggcagtagagagtcagcctgattcttatgtttcgtacatactattgcagacggtttgcgggaagatttccgccaatgagcgccacctgagttactggggcgtcgtcctcttgaaactgggcgatgggttgaagtgcgtcggatgtcctgctcgaaggacgcgatggcgacgctggagcggcttgtgcatgtgctcgtgcgtgctttaaagctgctcggatgcagtcgatgcaatgtggagcgtggattaaaatgcgttagcgctgtttgcaggtcggaactttcgctatgatcgatctcccgcggtaatggcgatcgggcgtgcacgtcgcggacagcgcaaagcttttactgtttgaacgcgcgcgactcgacgagaatccacggcgcctctggtacagtagcagagagcgccttggtcatgccgtcgaggcgcgggggaaatgagtggtcgcgcccagcgcggcgtgcatgacatgctggttggggaggatcacctcacgccttgcatcacgatcactcgagatgcgttcgggtgcgactggcgactcgactggagaggtcgacccttactcggagacctgcgtcgagtcggcgccgtcgttgccggagtttcgcgagtctgcaccgcgccgcctagcgaacgagttgaagatctgctccagacttgtctgggacaggctgtactccttgatgcccagcctgttcttggcgtcttccaccagctcaaacatgcgtgacaatgcagtggctacttgtggcgctgcatcgtcctcctcctcctccgctttcatgccggagaccttgtagcggcagaagtcggcttgtcgctccagcagcgtgacaccactgaatcgtgctcgaagaaactcatcaaggtgctgcacgcagtcctccagcaaccaccaactagcaaatgaagctacatcaatggaggcgttgccttgaccaagctgggtgaacaacgctggagcagcaacgtcagcacgctttgcattgccgagaaccgcgcaggcccctgcaagttgagcagcagtgatctgagctccagtttcctccgcaccagcattttgaagatggtcacacacaaggtgcgttaaatctgagatcgcgtacgaagggggcccctccagtttgcattcgagcatgaacccgtcgccgaagcgcgtcttcaagtgcgggatgctgccaaagcagcgcagacggccgtccaccatgataccggccttgctgcatagagcctcgcactcctccattgaatgggttgttagcatgaccgtcgaccgtcgcgattgcacggacgcctccaagatcacgtcccacaacagacgccgcgagaacggatcaacgccagtggacggttcgtccagtaccagcacactcggctcgcctatcattgcaatggcaagggatagcttgcgtttgttcccgccgctcaagctccctgctagtttgttggcgaatgcttggatcttgagtttgttcatcaagcgatccacctccttctcgagtctttcacgatggtagcctttaaaccggccgaagagctccaaatgctcgcgaacagttagcaagtcgattaatgcgtcaaactgcggacaatagccgatcgactcgcgcgcttgtcttcgctccttgcggatatcaaagccgttcagcgtggcagtaccggacgttggcagtaagtcgcccgtgaggaccttcatcgttgtcgtcttcccggctccattcacacccagaaatccaaagcactcgccttgctgaagcccgaacgagagcattttcacagcacgtttgccgttcggatagactttttcaagctcgaagacttgcaccacttccgagctggcattcaacgagtgatagctttcatgaacccgctgagcttcagagactacatcttcgtctgcttggtcagcatcgacaactttaccgcccaatggcttttgaatgtgcagtctagcgctgttgcaaggcacgcgcgtgtacacgcgccgcgctgagttgagtttatccaggaaccgagcaatccgccaacgcactgttccagcttggactacgtcgatcccaatcgttagaagtataaacactggacactcgacgagcaggtaccaaatatccgtgccagcgatgtctgcgtcaaacgcacttcgtgtctgactcgtgagcccataagtcgctagtagatcagccagcaaaatgttgagcaggccatttccaaacgcgaataacggtgagcagcgccagatgtagacgagcactgcattggctgctcgtgttgactctaaagaattcatggtgaaactcaacagcaacaagagaagacccaagaagaagttgatcatgaccgtgtagagcagacactcggtgggcttctccatcacatgagatagcaggtatgtcgctggagcgatagcagcgccaaataatacaaaaagcatgaccgtggcagctggaacgtcttgtgtgcatgaatcgcaagactcggcgccccccaaagacgcagtaacaccgtaggatcctagaagcagaatggctgctgtcatgggcacgagatacacggccacatcgaaaacaaagtttgccaaccagtacgcgaagaacgacattccggacagaagttgttggtatttggcgttctgctccaggtgcttctctttgacgatgtagggcatcatcgaggctgggatgaaggtgaaggcaatcacaatgaacaccacagctggaaagctcagatacgagctgaagatcgaccgtgtcttgaaggaaagcggcagtgggtgcgaagatacgcgaactgtcacgtttggattcgcttgtccagttttggtgagcaggaagcggttgatagcagtatcaatcatctgtttgtacgtcggcgcagcgtgcgctgatgatccgttagccataacattgtagctcaacgtgttggtagtttctgacgcatacaaaagaaaccctccgaattgccccttcaccggagattgagtaggtggagctgaatagtccgcaccagacgtatagccgtatcctctttcaaagaccaactctgcaaaccgaaggttataaccactcgtgtcgttcggctcgattgagggtgaatcgtaagaaactccaaaaactgtaggtgtcgcgactccatcatacactgttgtatcaattgcgagttcgtacgcagtaccgtccggaaagtaagatggatcaaccaactcggagcaccagccggtgcctgcaccactaccgacatcgaaattgccagggcagctgaatgggactggggtttgctgtccaagcgggtactgcacagtcgaagacagttctagtttcgggtcgttcacaagaaccgagctaaattttagagccgagagtccgacaaagatggcggcaacgggaaggacggtgctgaaaaacaacatgttgaagtcgcgttttccgtactgcagtcgcttgcgaagcagtgcattcatctggttggtaaaagtgttaatggcacgcaaggatgacgcctgcgtgggggcagattcagacctgtctggctccgctgcgactttaattttgctgtttgggggctgcacttcaaccgctgtttcccaggtctcagaaataggcggtttatcagataccaaactcgtcgtgaccttctcgtcgtggaatcctggtatttcagtactaccgcgttcggcaaccttgagaaaaatctcctcgagtgtcgtgacagagatggcgaaggagagaatgcccagctcggcttgacgagactccagctcgcgaaataatgccgggaatccaggtgaggcctcaaacggtagctgaaaagtgagctccgttccgacatccgacgcgacatttgcttgaggcgcgtgctgatgaaccagcaaagttgcagaccgagaatctttagcatcactctgtcggacgaaactgagacgatagcccacaccaaagcgatttttcaagaacagcgatgacccaacgcattgcagcctcccctccgccatgatagcgatccggtcgcccaaaatgtctgcttcgtccatgaaatgagtcgttaaaatgactacgcggcttgcgcggttgcgctggatgagctcccacgtactgcgtcggctatacggatccatacccgctgttggttcatccagaaagaccaccgtgctgttgcccaggaatgcaattgccaatgataatttacgttgcattccacctgaaagagcgtgggattgcacattgatcttgtcgaccaaaccgacctcgttgattttcttgataacttcagctgtaagctcacttgcatgtgtgaatcctttcagacggccgtaaaatattagatgctctttcaccgtcaaatccggatagagaacactgtgctgagggcaataaccaagcgactggcggattttcctcatatctttcacgacagaatagcctctgacccaagcattcccgctacttggtcgagtcatccctgtaagcatggacattacggtggttttccctgctccattgtgtcctaacaagcacgtgatttgaccctcataaagcttcaaatcgagtccatgaaccgcaatttttttcccgccgggcactgagaattccttccgcaagcctgcaatgaccacggcacgaccactattctcttgttgcttcaagtcttgtcgaataggctctaccgtatcgttctccacgtcaagctcctcgttcgtttgtgcctctgcggagacaagttgagaggcttgaggacaccaatacgcttttgtcagaaagaaataccacttctccgctacaccaaattcttgcgggacaaccttctcgaaatacttgccgagtagaacgtatagcacggtatcgagaatctgcatccaaacggcatttccaaaccggaagttgcttacttcgtcgtcagcattatctcccgtcacgccaattccgtaggactccagctttgcgatcactccgatgccttgggacaacgaaattggtgggaggagtgccgcgcacgttcgaccgacctcgctggtgtcgtcattgaaactgtaggaaataaaaaacatcatgaagaagagccccatgcctgctagtgaccctgcgcgggctcttgagaacaaactgctgatcataaagccgtagctgaagctactcgtagcgaaagtgaagaaaaacacgaacagcaatttcgtatccgagttgggaaacaacagtccatgagcaccgaaagtctgcagaaccgcgcccaatagtaaaatgggtaagtaagcaagtacccagccgccaaagagctcgctatcccgtgcaccaaggattcgcatgagctctcgggatcttgtttctttctccattaggaaagacacgatgacacgcgataccaggtacaagtaggacagcacgaagcctatagggaacaccaaggcgaccttctcgaagaacggagcatagcgaaacgcttgtgtcggacttccgtatacggccgcaccgtggaaaggttgaggtgccatacgcagtggcactagcagcgcttctctgcctagtggtggaattgtatccacggacgcattcggcaggctcacggagaccagactggtaatcaggtccttcaacgagttgagcaaagcaaaggcagtaccaataatgatgtcgttctccacttgtttcagcaatcgacgatcattatctgcatccgctggcataacagcctgagggacttggcaagttccattcgttgtttcagactgagcgtcccaggttggcatgcagttgagaaagcgtgccactacagtctgcaaggtcatgaagcctcgagtcgcataagccatgttgtcatccgctggtgcaaatttcgtaatggtgttgggtcttggcttcttggtcttcggcacagccgcaagactcccagtcgaattaaaccgtaaggaatacgcaattgagtgagcctccaacgctccaaatgctgcagtattctcaggaaactcttcaaaggtaatggcagcatagatcttcgggtgctgcagatcgagaccgtattcccgactggaaacgtactcctccaacgccgtctcattatcgaaaaacacgtgggagtctttgaagctcgggatagtcaagagtgatatccctttaacgaccggagcaagtgcaacacgcggataccaagtttccagcgccgcggcgaagtactctcgtgtatacggcgtgtcaggcgtgattgcaatcttgtacggcacgactctgccctgacaagcgttgggaacgtgataagcggtccgctcagctccagtataaccaaatagcagaaactttagagcacaatccataagtgcatcttcgcccagttcatcgagtttgtgcccttccatcaatgcctgaagggataaactcagcagcaatcccgccatagtcgtttccgagaagtagaacctggggatcttcaggctattgctcaagactcccaatagtgcgctcgcggacagtgtcccgttcgaagagctgttgccccaactgccccctgaagagtcttctggtacaacaatgcccacactactcaaaccttcattcaatgccgagttgaagtccgtcgccgcgtacagattccacgtcgagccgtaccccggagctgacgcgttgacatcgctggtagcccatcccgccgggacatccaagtcggtctcgaacttcttcagagccacgaacagcaggatgcagagcagcgggttgagcacttcactccacgtcgcgaacggatggcgcctcttgaccgtccagttcttcaccaccagcgctcgcagcacgggccacgagcgtcgctcactctccatcttcattccgccgagcgcagttcagcgcgagaagctcgattaaagctgaaatgagatgcaaagcagcacgagaaagccattgaaacggaatggaaaacggacgctcttgtatattcctatatggtagtctattgcggctcgaacaacattgtccgcgccgttatcaaatactgagagtgagtcctcttacttctccgcagcttctttggcttcccgcttggccttcgctgctgcaatctgcatgcgttgttgacagtaggaaaccgaagtgagtagtagtacagtagtagatgtaccattgtcagactgttcgactgggtcttgccttggctgccatggcctctttgcggctgccgaacttgcggttcttgccgtggatgcgactcgcctggccactggcggtggtggccgcgatggcctgcgccgcggtctcctcgcacgcctgcttgagcttcatcgccacgcgcttgtgctggatgtccgccattgtcgtgctcagaacaataatgactgctggaatcgatccgaaattagtgctcgaaaataattgaaattgttgtccgaaaataaaaaggtgtattgactaccaggcgtacaatagtatgtatccatgtcgggttgttgtagtccgggaagtaactgtgaaacgttggctgaaggatcagcaagtgcgaatcatcgtcatgacgtcgatgacccgaggcaacgtttccgccgtcaagaaggccgcgtcgaccgcggatggtgcgtgaccacctcagccggttgagtagatatcacatgacgtgctaattgcagtgccgcgcattgtggttgttgcctgcttcgctgacgcagcgccaatctggaaatcgtacttggccatccgctcgcccagcgccagtgaagctgccgacgctctggatcacgcgaagaagagcgctggcaatggcatttctcgcggtcggaagcgagcgaagccttcagttgctcgagcaggagcgaatggacctggaccagctatttggatgtcactggccacgccattgacaaccacgcgacgcagcggccatggagatgaagacgacggggccaatgtgctgaagagcgtccggcagtattgggagcagctcagtgtaaatgagcgtcagcagatattgtttttggacgagccggagctcgtgaagcagctgtacaagctcaacttgagcttgttgtgtgtcgggctgatgcagcgccacctcaagacaacgaaccgaacagctacagatacgtcggccgccaacaagaaagcggctgcaacggtggcaacagcaacaggggcaacagcgccaaaacctgtgggtgctgatgctattccggcggtacaagagcgaacagccacgccgtcgcaaacgcgtgcagtcacagatacgtcgtcagagaggacatacgagctgctggaagcgatggagtttatggatataggaacaggtgcgtagcgttagtacctcctgtaggtcactaaagcgtttttatttactggtgttgcatgctgtcacaggcattctgacggtgaagacggagctggccgaagacacagatcgactcttcacgctggtgggggaagtgctggcaggcttcttaacgtcgatccatgtactcacagagagtaacttcaacaaactgttcgtgaccgaaagcgaaaccatcaatacgtggacaaactatcaacgcctgattgggatgctagtggagcaggtacgctcgattgtatcgtgttgttactcgaacgttactaaccttttgtttggtgactgctttttgttttgaaaagctaatcctacgaagctatgtcagctacttggagaaagaggcagctcaacaaatggagcagctactgctggaggtttccctagaagacaaaacgactgcaggcagctcgacttctagcagcaaaaagaaaaacaagaagaaaaagaagaagaaatcagcgatgcatgctgcttcagctcccgagcctcccaagaacgacgtaatggataggcccgaggcagattgcttgggtgttgaggttccggaggaagaacccgtctcagagccgatgcctgagtccacgtcagcctctctagacagtgattgtcagtcaaattcgtcgactgcaccgctcgacgagcctgcactggacgcagacgaagaagtacccgcttcagaagcagagcccccctcgaagaagttgtctggattaaaccccaacgcgctggtgtttcaacctcaagaatcattcgcatcagccgaagacttcaccacgcgaacggcttttgctggcaagaggaagtttgacgagtacgttatcagcgtcccgttggaagatgtcatcagtgacaccagcatcgcctttgacagcagaagcgtcggtggggattccgacgacgaagaagtagtcgagagtgtgcacgatcgtgaacgtcgtcggtggagaaaacagcgccgccgtgaagaagacgccaagctcgaatggcagctacaacaggtctatgcgtccacgtcgtcgctctttggctgggacttcacgaggcaacgcgagctaccagaccccgcggtcaatcttccctggagcgagtccacgttatggagaacagcaccgaaagaagtggtgcggtacttttcaccgggcaatggcgacgcgtactcaaggttccaagctccgcacttcttgccagcaccttcagggcccccgccgtcgcggtactacttcaacccagggccgccgatgccatttgggccgccgttgctgcctcctccgagcatggagccgatgccaccgcatctgcaaggcgcgttcagcttccagccaccagaattccccacggtcgtctcatcaccagacttctccaatgcgcagtaccaccccagcaaccacgaggaccaggtggacgtctgaaagaaaaagtggtcctccaaaagtctgcgacgtgtgtcaaggcacaattattgttcaaatctatttaattttaggccgttgatacagcccatgttttctaaatgggttagggcaagcgccatactaaaaacaagtaagaaatctcaaacatgttgaaacatggccaaacatgttcggctcgtgggacgggtgtcatggcctgcaaacactatgcaattcctatgggctaaggtgatcttcggctgccaaacgtcgctttgccggcgctttaagccctctgaagaccgacccagcgctgagaaggggataccatgactagccatgacactggggtgaagtttgcaggctcttcatgcctctcaaatgccgctggtgtcgatttcgcttggacgctcccgacagatttgggttcatttcaccccctctgactaaaaacatgggctctatcttttccgttaattttatgacatccaatttattgcgtgtggtagactctatttcgtacttagtgatagacagctttgactgccggcgcacttgtggtcgagagactccaagagctacagtaccgaggaccaaagtgacatggctctgctgctgcgtagcgtgacttccgtgaccgccaagcgggcgaccgcctgcgcactggccgaggccgcctcctcctccacgggcgtgcgcggctttgcgaccaagaaggacaagaagaagggcaagaagaagggcggcgacgacgccaacttcgagcagatgctgcgtgccatcaagggccagtaccccgaggcgtacgttgctggtgcctgcagttgtttattcacttcatacttattgtaacggtaggactaatgaattaattattgcattgatgactgtagggaggagtggacagaggaggagaagcagcgccaccaggagatcggccgccgctacaacatcatgagcagcatcgagcacaaccacttcatgcgcgacgtgcagaccaagatcgacctcaagtgggaggccatcaacgcgctgcccgctgagctgcaggccgaggccctggaggatgacatggctcccgtccccgaggagcgcggcatggccacctggacgccgcccatcccgggcttccggcgatacacggacgaaggcgccaacgcgatggagtaggtcagagcttcattgagcaggttacagccgtcgatatgcagggaagcggcaaatagaacgagttggagagtgaagtgctgctagaagttcgtgttttggcgagggactatgctatgctatgctatactgacgtttactggggattgcgcagccctccgttatgcaatgcttgctcgtaagtgtttggcggtatcgctgctttctcttctgtgctatcttcttcttcgacgtcagcgactttatcgagacttcctggtcgtgtagctgcgggttgcttgttccaccactcccggacgttgcgctgaatgaccagcgacgctagtgcatgggccttcatacgcgcaaagtttttgcggcacagcacaccgcgcgtggcagcctggaacttgatagcaacgtgttttgtctgcaagaagctgcggcgagcgagcatactacgcgtggccgcctggacagttacggcggcacgctctcgctctgacaactcgctagccaccatggagcggtggtctgcggcctcttgctgcttttgctgatcctcgatggtttgtgttgcttcacgcagttgcttggtcgtttcgcgcatgttcttacagttcctcttgagcaaccacgcccggataccgtgctggagaaccttcacctcgtcttctagcgactgtctttcttctgggcccatgagctccatagccgcttggagcttgttgaggccttcctcatcctcagcaattacactctgaacatcggagtcgttctctgttccagatagcatcaatcggccaccgacaagattgctgtccatgccgaccatgctcgctggggacgaaccgaagcctgccgacgtccccgtgctgctgctgggagaaaccagaatctcgtctccaacgctgctttcacgacgacgggtagggtggccagccgagtctcgcgagatactcaacgaaagcgcacacttatcgtgcaaactcatggtcgagaaagcccccagcaagagcttccgattgtgctcctggttttctcccacctgcgattcaaattcacagcaaagccacactggttagtacccgtatattcgccgctaaacacacaatatgccgaggacgtacgtatgatgttgccttagacgctaaacttgcctcgcagggactctcgcaactgtttgagtgggaacggggtgggcgtacggtggggacaacatgactactgccttccaaaaggcccatgtctccagcatccatgtagggtgtcggggcgtcgtcaatctccatcggtgatcctccaaacccgtaaatctcgtcgacaacacccatatccgtagaagtatcatctcccatgtgccggtgcaatttagcagcaacgtcagcgtgacctgatttttcagcacgatcggcagcagtaagcccatcaaaatcgcgaacttgtaagtctgctcccgattgcagtagcacatcaaccactgcatcgtgaccgcatcctgctgctaggtgaagtgctgtttggccttgagtgctttgctggttaatgtgtgctccgtgagcaaccagtaccggcaccaactgtgaatagttgtagaagctcacgtagtgcagcaagctcagaccagtttcatccagcgagttgagctcctccagcagttcttcgctcgtgtgcgcgactgtaacaagttggcgcactacccgctccagtagtttctcggagagttgttccaggtcgttgtcgctcaatgcttcaattgtacagtcgtccaacgcaattgacgttccgctggatgataccaacgtacttggagtttctgcagcctcgcctgacagattttcctgattggtgtgctgtatttggctagttgatagccccggagacgactgcatagctcgtgcggaggagttgtgctcggctccagatctgttcttctccacgctactacggccggaagcaatgggcagagctcccgcatccttagctgcaggttccgctgcttttgttcgtattgcttggtgaaattcggacaaccgctccaccactcgaattttgcattgccgctcgtccactaaacaacaaaggttatcaacaaacgttagagtggagaacaaaataaataggcaggcgaagcatgggaattgacttacaatccgactcgacgtaggaagacaggttcctattagaaccagacagcctttcctctgatcgctttggacctccagtagctcgggatattacggttggtgatcgacctcgcttaccagaaatcccgggcgatgaatacggcgctgtcagttccagagggtcaatagctgctgctcctgagcgacgtttttctttggcaatttcaccaacaagtgaaggagacacctggtagtgacttcgatacgtaaactgcttcttgtgggacaactggatgcatgtctgttgtgatggcccacccaaatggcacacgaagatgtcgacgctgccgaggtcacgtgagctaggagctgcgtaaaaacaccagacgcagttagaacccagcagaagtattcctcacaaattacaatgagaacgcaccagtgcaccgaagtacggtatccgagactttttctgcgcgcactcgcttgcctccaaactgcacaaagagtctcgtgggatcttgagccgatttctccggaagccttgctgcaagacagagcaagatcttggctccgccatctccaaagtcccagtccggtgaaaaatctgaaatttcagccaactcgaatgtctgctgacctccaagcccacaaacacccgtctccggggacgtagcaggagctaggtcgttaaataaatcgtcggccccgaactcagaggtaattccttccatgacgttgtccttcagcagcagcagatcagtatcagagaggtgggttgctgaaggctgatacgatgtcgtctgaggctcgaagtccatctcaaaacagtctggagaacagaaagtaaagccaaaggttaggacaaaatgatctaacgaacgatacactggccacctgcatacttttcatgatggattcaaccgtctcttcagaggacaacggcttgggtgggctcggttgcctgagtggcagtatcgcgcttgtcgagttggtactagcaacaggcaacgaccgcttcacccccttattcacgctgctcttggacacatctgccgacatctgacgtcccacggtttccttgtttacctcgtcaaagtaatggacgagaatgatgttctccttcgaatcgcgcaccgagtagattctccgatggaatgtctacaaccagagttcgtcagcacctgcaaggcctctctctatatctcctcccactaatcctctgcacttggacttactgacgtctcagctgagtgcacatacgtgcccagaatgatcacttcacggttgatcacgagcttcgcgcggtcctcgcgaacctggtacacaccacacacaacctagttaattctcagctccagcgactcccaataccacagcgtcgtccccgcacccgtccgctcttatcctttcgcttctgccagtgccacccgtccttcttgtagtccgagacctctagcgtattgtagaacagcagcgtgccgcctatcgacagtcagtcagtgaccacattgcccacagcagcagagcgtgagtctttggctgcagtagatgaagcagcgcgacgcgacgtgagacgtacttggcggtcgcagctgcagcgagcgcagcaccggcacgcccacgagtttgtggtgcagcagcaggaacaccagctcgtccttcacgagccaccgctgagccgcttccttgcgcagagaggctgcgcgcgcttggatgccatcgcccgagtccattcgcctcgtaacgtcgtctgtcgctcagcctttggcttcaagagggcgccagacagtaccgtaaagtatgtaatcttgtctgtcgtcccgcagtgtcgcagattgccgtgaacagcaacgacaacaagctgaagcttgggcttgtcatgttgctgtatcttgttgataagcttatctttctacttgcggggctctatgtggtacacgcggcctggagccacgccgccgaagttggtcatctgcgccgccgtgcgctgcttcttgctgcgcattttcatcgtgtgccaggccacgcgctccgggtccttgaagtcggccacctgccagacgactccgggcactcggatgagcttggcccttgtgggtgcggctggcgtgttggcgaagagctgctggtacatggagatggtcgacacttcttcatctccgccggcgggcccgacgccttcaacatgcagacgatatgcgtcgcccatgagcgcgaagccaatcttggtcagttgctgcaggttccacagcgccagcgtgttccagggcgacgtcagcccgctcagttccagcggctgcatcgctggatccggctggaaggtgtggccgggcagtaccgtgcccacgacgagatcgtgctccgggtcgaagttcgagcgtagcaacgccaccccagccgcgtcaacctcgatctctaaagactgcaacagcagtgtgtcggcctccgggaagtgatcagccgcagtaccaacgagagcattcaacgccggcacgaacttcccccagtagagcattggaatgatttccaccttgccggcaatagcacccgaggccacctcgctctgcagctccgtcatgaactcccgcaccgaatcaacaaagacgctggtagctttggaggaagtgggcgagatcgagtcgacgctgcgagaagaaggcgctggcggcgctcccgtgatcgtagcggaggtcgcggccggaagtcccacggcgatgaggatcccgccatccgcgtaggtcgcggcacgcgcgcaaaactcgcgcagctgacgcagcagcttctccacgtcgatccgctcgtgctgcgtgtggctctgccaatgcagcctcgtgccaaccaccgtcgtgcccctcatgccgcccgctgccgtcttgcgctcgagtactgctgcttggaactggaagcgtttccacgtcacatcgcgagggatcagacagattcagaaacggaccgcaaactgcagcaactgcaacgacatcgtggtgatcacttcgagtttgggccgagattggcaagtgtcattagggagctcgaggtgctcgctattactgggttcactctacttctcaatgctggcgacttcaagcctccaagtggtacacgcgacctggagcaacgccgccgaaatgggcaagttgagccgcagcgcgttgctgcttgctcgccatcttcttcttgtgccacgcgagacgctcggggtcgtcaagtccatccacttgccacgcgatgctgggcactctaaccagcttcgccgtcgtgggtgaagtgctgttcgcgtagagctgctggtacatggcgatggtggcgacctcctcgatgcccgcggcggatccgatcccatcgacctcgaggcgcaacgcgtctcccatgagcgcaaagcccaccttcgtcagttgctccaagttccacagcgccagcgtattccacggcgacgtcaagccgctcagctcaaccggttgggctgccgaatccggctgaaactcgtgtccaggcagagccgcgcccaccacgagatcgcgcttgagatcaaagtgagagagcaatgacgccacactcgctgcgtccacattgatctccagagactgcagtagcagagtgtcggcgtcggggaagtggtcagccgccgtaccaatcaacgcgttcagggcaggcacgaacttgccccagtgcagcatcgagatgacctccacgttgccagccatgctccctgagtctacgtcgctcttcagtcgcgccatgaagtcgcgcacagagtcgatgaaggcgctggacgaaggggtcgcatcatccgacgaacgagcggctgtgatggagtcggcgagcgctgctggcagccccacggcgatcaggatgccgccgtccgagtacgtcgctgcgcgcgcgcaaaacgcccgcacctgccccagcaccttgtcgacgtcgatccgctcgcgctgcgagtggctgtgccagtgcagtcgcgtgcccacaacggtcttgcctcccattcttcccagcaattaattgctaatgggattctgattcccccatctgaggaggcacttcaactaaggcgtccaaggcaagatatacgcatttgcagtacacttcaacagacaactatgtgcatctagcaacgatactcttggcgatgcatattactacgtggaggagtataaacactgtttatttatttatgacggcgtcactgcttgacaactcgttagtgttcatgaggaaacatgcgtgccgtacttccctactgtgggtagagcccaactaggctacacactcagtagtattcacggtgaggcggaggtgggggcggtccatatccgtatcccggaggtggcggaccataaccgggaggcggaggagccgggtactcttgcacgactacaggttggacgtacacttctctttctctgggcgaatcatatcgacgtcgatcgtcgttgtctgcagccgaggcgcctgctagacagcacgaggcacagcacagaccggccaagcacccgcagcactcgtcggcgcagcagagatcacatccgccatcgtcaggtccgcacatggtcagtctttatcttcttttggtcgcttgggcctgagcttggtaggtcttcaggtcagttggctcccgcttccgttcttctcttcgatctcttggcttgagggcttattggaaattctcgcaatgatcaaacttcctctcctcaagtcgcgcctgccagaagctcgccattcgaatgagtttttcatttgcatcattctgcgacgtgtgcacacttgaaaagtgtatgtcggttgtgtctcacgagccacagcaaaaacgcgccaagttgttgatgcttgaaatttacccacgtcctgcgcgtatcgtaatcgcactataggcgccggggccgtccgctaggctatctgcgggccgcagactgcggcgcagattctgcgctagcgatgcaatatgtattcaatgcactgttttcattatcctcgctgtgctggtccttcctgatattcgcacgttcccacttcacgcgatgaaggagtgcatcacttcaagcaacgtgctccttaggtgaaagtccacctcgtcacatacctccagctctcttcgttcctctcctacgtgcacgtccaaggcctgcatcaatcgatggcgcgcacttggggctgcggcgggcggatctgggacatcacgacgggctggacggtaacgtcacgcgagctggccaggtcccggcggcgaggatcgtcctcggcgaggcgtcggcggttgctatcgttcgcggaggccgcgttgccagcgaagcacgttgcgcaacaggagcgggcgaagcatgagctggcgctgtcgggcatggtcgttctcggggtgtttctcgatgtgtttagagacgttattgggagtgggtcagagggaaaaaagctgatgccagctggatttgatacactttgaagttgacgccggtattcaagtgtccaagccgctcgcacggtggacttaatggacacgggcttatgaacccggtgtgtgctaaaagaattcctaagaagatagcgccgatttaccaactacaaactctccccctccaaaccctcgctcagtccttgcggccgttctgctcgaggaatgtcttcatcgccgacatcaccgtggccgtcagcgcctggcggtccttctcgcgctcctcacgctcgacctcaagctcccgctctcgccgctccgcctcgagacggcgctcttcgcgctgctgcagcagcatctgctccgtagcccgcgcctgctgctccaccatctcttgcagaagcgccttcagctcagcaatgtttgaggggtcaatgtcattcaagaccgcagaaatcgccgccgtcttcaacgtcttgggcggggcacttgacgaagcacttgatgccggctcgggctcgcttgtgggggtgatgaagctctgggtcgcagccgaagccggggcgggaactggcgaggacggttcgctcgtgctactcgaagagtcctcgtcttggcttgtagccgtgcgctgattctcacgttctgccaccgcgttgaccgctccggtcgcgatcgccacgttttgggcaagcagggcggcgctcacggggtctccaccatccaggagcgtgaccagctccgtcatgagtacttcaagttcacccgcaggggcgcccttggggccgacaacgcgcccactgttgcgcttgacgcgctcacggtacttggacaccaggttctcgaagcgatagcgaacgatcgggcccttaatattgtccttggagaagtcggggctgttgtcaagcttgttcgccacgtcttcccaggccgaagagatcgcgccaaacttggcgcggaaaggcagcgattccttcacgtacttgacgagcaagaggtcgtctccgggcgtgaaccgttggcgggtggccttggtcacaataggcagcgcctggtcctcggaatccacgaggagggaagtggacgacgacgacggctgcggacccagcggggacggcgcaatagccacctgcgaggcctgcagtgccggcttcttctccgcgggtccgtcctccggccggatcttcctggggcggccgcgcttgcccagattttgcgacggcggttcggcctcggcggcgtccagcttgggaataagctcggccatgacgctctggaaggaggcgtcctgcgagggtgcgtcccccgggtggctgccgttcttgacccactcgcggtggcgccccacgaggcgctcgaagcggttcttggcgatgggtcccttgaggtggtgcatcttgaaggcgctgcagccgttgagggtcgtggcgaccttctcccagccggccatgagcccgccgtagggcgcgcggaacggctggtccgtgttcacctgcacgacgagcaggtagtcctggctgggcccgaagcgctggcgcattcgctgcttggtgggcggcatggttcacggctgcttctctcttcgcggttttttcggtttttgattctggcatcttggaagcgccagacgcccctctcatatcgaatgctacgtgaaaagggcaggatatcaactatacctgttcgctttgtgattcatttactattggtagtggaagttgagcagcataaataccgtacaggtttggaggattcaaaacgaactgggattttttgaaacaggcaaaacgcgctcaaggtggagccggtcacactctctctgtacggtactcacactgtggccgaaggacctctaggtgatttacgactcatttctcgccggcctagcctcgacgcctttgaatggcgttgttggcgccgttcaggtccatgttctcacattgctgtgaggccataaagaggaatgttctgcagcgattcctggatgacattaccagcaaatccggtggtcagttaggggcggaatgacattacatgcctcgtggtccagcacctaccgtcgagcgcaacgagttgatcacgcagccgcactccaccaccttgcctccgagcttttcgacgagctcgaccgtcaccttgagagtgttgccctgcaggcagcaaaagcaacaccgcagacagtaatacagtaacataagccatcgactagcgaaaaatgcaccaagtttgtgttttctccgcgagctgacgcaccgacgcaacgaggtcgtcaatgatcaccacgcgccctccctccgagatggcgtcctggtggatctccatgcggcccgtgtagaagcccgacacgtagtccacgcccacaacgtcgcccggcagcctgcgcgcgcgacgcacgggcacgaacgcggcctgcagagccagcgccagcggcgctccgaagataaatcctctggactcgcagctcaccacgtgcgtgatctgctggtccgcgtaccggagcttgagcgcatcgatcgccgtctggaaggcgacggggtccaggagcagcgacgtgacatcgctgaagtttgcgccgggcttggggaagttgctgaacacgcggatcttgtgcttaatgtacgcagacacctcctcctcgttcgacaggtccgcgggcggctgcattgcgagcttctcaccgctcatacttgctgatgtttcccttgaatgcgtgcaaggagagactaaaatatgtgtcgagactataatttggccaatccaattggaccaattcacaaacatgttcgcagcaggtcggaaggcggcggccggctcctccgaggtcggagctggaggcagcgacgctgctcaagcggccggctcctccgaggtcggagctggaggcagcgacgctgctcaagcggacgatggtgcgttgtcaaggtgcttgttaggcaatccctcctacaggggcgaatcgacactgtgatcctaattttcgttctactagactggctcagcattggcaagagcttctctagtgccactggcgacgataaatccaaggcgaagcacaagaagacggaggcatctgagtcagcattacaagtttacaagcgtgataaacatcgtcacaaagagaagaagaagcacaagacggagaagcggcataacgaggagtctagtgctgtaacgaagcgcgagggtcgccacctctctaaacacaagaagaaaagcaaggacaggaagcgccgcaggtcctggagtcggtcggatagctgcgatgaagacgatacacacaagtccaagcatcactcacggcggcgtcgacatcgcagccgcagcaactcgcgctcacggtctcgtactcggtctcggtctccatcacgcagctacagggatgagaaccgcatcgtcacccaatcggataaaaccctggcgctgcacgaggcgcaagacaaggaaaaactcttcgagttcgattgtgtgggtgaccgcgagaatcgcttcttcggatcaacgtacgtgctcgaccagccactctatgacctggcaacgcgacggaatctacgcatgggtgcttggatagcatcaacacgccctaatttcaacaaaacgcccgacaagcaagaaggcaaacaagaatccgaccggtatttctccatccaggcacgcaaaatggagagggatggccgacggaagcggctgtatcttgcctactccgaaaaaagactatctcgcgcggcggcttcgcaccaaggtgatggcggtgatcaaacaggccatactgcaaaagtcgctgcgagctgtctatctgagatgccattcattcctttggaccccgtggttgacgtcaataaactcgtggctcatgaagtcgatgaggatcctggccgtaccacaagcaccagtgatgctactagcgaggttatgctaactgacggccaaagtgtggagcagcatctcgttgaacgaagtaagctgcttaatgctggggtagcagcagatccacgtgacatcgacaagtggctcgacttgatagcctttcaagaggagacacttcgccttcacaacagaggaaaaaaggttaatcctgctatgaaggcgagcgtcgcggaaaaacaagctgcaattttgtcaaaggccctcgccagcaatcctcagtcacgaaggttgcatcgggtgaagctgaacatgacgttgcaaactcaattgcccggtgaaggtgctgcgtcggactcgtttcagcagcagttggaaagcctgctttcggaagatctcaccaacagtgatctatggatcaagttacttcaatgtcgccagcagcactttggtagcttctcgatgcagtctttgcgcgatctgtatgcgcggatattgactgttttgagagccgggattgaaaaaaaggcgaaaacagcaacggaaccttcaaaccgagctccaggaaggggtggaatgcctggcgaaggctcacctgtcgcaaagtcactggatctggcggcattacttctcgactttcacatgctcatgtgcatatttgagaaaaaggcagactacgtcgaacgctcaatcgctcagactcaagcgttaattgattttaatctgaacgccaccaggaagaagactggcgataatatgaaccacttggaaatgctgcgagactttgggtcacgttggaacgagggtacttcggtgggattcggcaacgagcaatgggatacgagtaatggagtgagacgggtatttgagctagaacctccagaactatctggagctcggtttgaggagtacattcaaacatgctgcgttacttcactcgacaaagtgaatccccctgaagcgatacgaagtcaaggacacaagcagaaccttttgtctgcttctgctgactatcagcgcaagtcaaagacaaactcaaaatcagtggaaagtgagaatggacatgattcgatcacacacttggctgattccgtaccaagcgatgactccgagactggttcaaggcaaagtggtagacttatttacagcaacctgcatggatatcgaatcagcgttgatgatgccgatgacgcgaaagaatacgagcgcattttacgcgagttgagaggcacggaaagcgcgcgtgcccgacaagaccagttaattgaaaaggaaaaagcgaggcgtcaagtgcttgcagctacgaaaacacaactggaggaccaacgcgcagatttcgctgctattagcgaagacgaccatttcatgaaatggcttatgcgtgaagaggcccagtcccagttgcaatgggctcctttgcaatcgaacaatcctcttcaccaggagcttattgagcagcagcctgatcgcgccgtattgacggatgaaatccagccgtttttgtttactgtaccggagtcgtgccgatggcgacttgttgttcagcttcttcatgtatgcggtgtccaatggtgtggtgaatatcaattgaacggtcttcaagattgtcagtggatgtacgcagacgatgctgcggattgtgagctgctcgtgaatcccattttgtcggctctcagcccacaaccagatcactccacgaagaacgcgttgtttcttgatccatgtgaccggaaaacactcctccagactgcgcttcttgacgacattaaagtgaaggagagtatgctacgcgacccaagcaaggtggattttattcgcggagtgttcgcccaagcattgagttccttccaaagcgttgacgagaagttcgtaaggaccttgaagtgtttgtggattggctgtgaagccgaggttacacgtgcagccggtgtcgatgaagcttcgttggcgtttgctcgtcgtttgagccagaaattggcgcaggagagcgttgatcatgacgcaggctttgacgttctgttcgcttacgccaagctcgaacataaattagggaatgagcgtcaggtgcggcgaatttgcgataacacgcttgcatcgctaagtgcaccatcctcaagcaacacaaatcatgttcaccgttttgtgtttcttcgcgcgcgaacggaactgtggcctctggcggaggacaaaaagaaactaagtggaaagccaactcgtgatcaaggccaacttcgagttttaagatccctgtatatactgtggaatgtgtggcagccagaccagcacaatggggaagagcgggaaacgcttgatgctattgcgaaaacacaccgaaagcggctccacagctacttgcaggagcttatgacgtccgatccatcgaccgaaacggatctcatcgctcgatatcgtgtcgagcttagatactcgattctacgttgcaccgattcttgtcgacagtctttcggcgggtcacactgtcgacctgattgctcggtgggctactgtttacataacttggctctggtggtttatgcgtatcaaggttttgaggcggcttgccacgagtatcgtcaagttttggccaactctaaagaccaagactgctcacacgtaagatgggtttggacttgtttcctggagttcatgcagcagcatcaagcttcaggtttctttccagttgttgctccgcgagtgtggcgatcttccattggtgaggcagttgagaagtttccgaacaacgcgttatttcttcggctgtttgtcgatgctgagacgggtaacacgatctcccaagtgcttcgcaactacttccttcgggtagaaaagcgctggcggcgacattatgattccccggaactggtggagtggttgtttgcgctgctttgtgaagtttgccgcattgagcgagctgcgacggtcaagtaccttcctgtgcagtcagacgatgacaattgctctcggccaacgtgctgcctcttccatcggtggagcatgaatagcactacagtcactcgtatccgtcaaatgtttgaaagtatggtgaaccacatccgtacaaagggtaatgcgctatgctggagactgtatatgcgctttgagattgcgctcggaaaggtggaggcagcgaaaaaggtgttataccgtgggatcgcagcctgcgcctggagcaaagcgctgtacatggatggcttgcgcgtcctgcgtccgtatttgagcgaagatgaatgccacgaacttctcgagttgttggaggccaaggagctaaatgtgcgagtagatttcgagtgaccaaaattagcaaagtcagtactgcagtgaaggtccagatgcaagaacgacaaggagacactgaagcgagtgggtgtcgtaggaggtttgaccgagcgggtacttaacgtgagaatatatcgccgagcttcaggcctcatactgacggatgatggttgtgataggttacaatctgatcgagcagcttgctgcgctgaatggctcagaatggagtgtagcaggcatcttaaacgaggttctacccgagcaaaggaatttgtgggaggcgagatgcttgctgaagcccgtatcatacgagcggaacactcccgacagcaagaagcgcattgtagcgagtattcacgacaccagatttaagcgcagtggttctgtggcaccaataccagtagctgcctccaataccttcgcgttggccaaccctttctccaagcaacctgtcctcaccgccgatactgataatcaaccaagcttgggcaccatcggcaacaattatcgtgggcatatccttactctttgggaggacaagttccgccgaaaatgcttggcagtggaagatgtgctcttccttcttgcacgcccgaatgttgcttgtacgttagaaagcgcgagctttctgcgagcaacgcagatgtcctatgatcaagttatcgagctagaaatggcgctagcgatgcttcgtgaacaaggggggtggtgccatcctcatcctgatcactctcaagcgtctgctgtctcgctgtgtgatagacttgcacagaatttatgggttcacggtcgaacgttgccaatttcgcggacttgcagcagcatgctccccgaggtgataagaacaaagcgtttacccgcagtacgagtgaagcccgtacgcaaacgttacgagagaccaacagtgcaaccccggcctcaattggaaaatcaatgtagcatgctcagcaaagcaggtaatctctacacagcatcgaagcctaccagtatgaattcaggcaacaatagttaatcgatcactgctaacagtgtcatttttgccgtgtatgcaatagctgctacagctccgtcgataaatggttgcccacttgatattcgagattgggttcgagatcactgtatggaggaagttgttcgatccactgccatgaggaagcattttgctgccgaaaagttattggtatggactccatacctgtgtctttattggttcgccaaactcacgctttatttacccagatatttgtccgcagacacctccaccaagtcattcaccggcgctttatgtattggcgccagcaaacgatgtggatacaatgtcaccaacaggcccgcagattttgccgcctgtacgtctacatcttctacttcctacagggaattgtagtgactaattcgttgtgtacacggcttggactggtaaggaaatgcgcgctatggattcttcaaagatctcgcacaagactgcaatctttagtctttcgtctgtgggccaagtggatggctaccatagcacagcaacgggagtacgaagccatcgctgctgctgtatacattcaaagttggtttcgcggagtgaaaggcaagcaagctgcagctgttcatcacctacatcgagctgcaacattgattcaagctcgttggagagggtttctttcacgaaaaatgttcaagcggagaagacgcttcttggcatacaaccgggctgctcatcaggtccagcgctactaccactcgtaccttttccgcgtccgctgtacggtttggaggaggcaacaacgtgcagcacgtgtgataacgcgtgctttcaaacattatctcgagaagaaacgcgacttcatcgcttggtgtcatcatttggctcgatatcatgccgcgatctccattcagatctggatgcggcgaacgaggagaagaatcgcccgcgccaaagcgaagcgcgacaaactgtcacgagcgagccacgtgctgttcaatttctttcggtacactcagttcatgcggcgctttgggacgcgcgtggagactgtatcaaagcggagaaccgctgcggcggtgctgctgcagaacgcgtatcgggctaagcaggcacgagccagattctacgagctgaaggtccgactggaggaccagcgacgccaggaaatcttagcgcagatgtggaacaacgcatacgccacgaccatccagaagtggtggcggaagcggagcaagctgctgcaaagcagcttgaagttgaagtagacgtcaagagtgatggtcacttcaatcgtacttaggcgaaacgccaaatccaaaaggtgatctgactcagagccgcatcctccccccccccccctcgagaagccatggagaagagcgagctgcgcgtgcggtggctggtgctgctgctgtcgtgtctgctgatgatcggcaactattactgcttcgacaacccggcggcgctcaagagccagctgcagcagcacttcaacaccatccccaaggaccgctacgagttcctcttcgtacgtcttaaacctgagatcttgctgcatgctagcgacaaatgtcggcatttgctgggcggtacagagagtattaaccaattgcacattgatattacctgcagaacttgctgtacacgttgtactcgatccccaacatcctgctgccgttcttcgggggcgtcttggtggatcggttcggtgcgcgggtgatgctgttcaccttctcgacggcaatcttgacggggcagttgatcttcgcgacgggctgttccttgtcgagcttcaacttgatgctggtaagccaaacgttgtcgttttgtgttggatgttagttcaacggaactgacagttttcttgttgcatttcttcagtttggtcgcgtggtgtttggatttggcggagaaagtctcggtgtggctcagggaacgctcgtcgcttcgtggttcaagaacagcgaacttgcgctggcattgggcatcaacctcagtgttgcgcggctggggagcgtcatcaataacgaactgagtcctgttgtctcccaagcatcaagcgtttccacggcactgtgggtgggcgtgatcatgtgtctggcgtctaccttcatggtgctattgctgataccaatcgacaaacgagcggaaaagttgacgaaagagaaccagaaagaggcaggagtggctgctgaaagcatccacttcagtgatatcaagcatttccgcccagctttttggctcttggcgctgagctgcctggtggtttatggctgcgtgatcccgttcaacaacgtcgcgagcagtcttcttatggagcgggactttttcaaggagccccctgagctgtgccgacgatgcggagaagggctttacgatttcgagatcgattgcgccgagattgtaccggggtgccccagtgttcctccatacgggtggccgttaccgttgttgtcagcgaattgcacaatcaaagagccgctcgatcaatggaactgctcgacttcccctccgctaattgaaggagacaagatcaattgcgacgacgaagcttggaggcttggaccttttacgcagacatactgtgccacgaaaatggatgcggcccagaaagctgcaactccgatgtccatcccgtacattattagtgcggtcatctctccgttcctcgggtttgtggtcgaccgaatcggtcttcgcgcgtttttggcgctagtggctccggtcgcgctgaccgcggtccacgtcatgctcggactgactcaggtaagtctctacgtgccgctggtgcttcaaggcgtcgcctacagcgtgttcgccgcagcactgtggccgtccgttccgtgtaagtacccgatgggttgaagtggttgggctctatgaatcttcaccttgtttggttacttacttcatttgcgttatttgcgtttgtgcagacgtggtggaggcgaagcacgtcggtactgcatatggagcgatcactgcgatccaggtttgtacaatggctgggccatgcggcatttgaaaaatctactcgatactaagcaaatgcttgcgtttttcggtatctgtttgccacagaatattgggctcgcactatttccgctggcagtggctgctgagttcaaccacgatgatcggtacattcctggcgtggagttgctcttcgtgtcgtttggcgtcttgggcagcctcgtgggcattgcgctcaatgtggtggactaccaaaacgggtccattcttaaccacacaaacgccacgaagagaagggtctcgctcatgttggacgaggacgccctcgacaacgaggcactgctggctgcggagcactaatctgtgtttgcatctacattgtgtaaagcttctctgaaactgaaatacaagagcggtattatattgacattcgacgagtagtctcgactgagttcgttctttaaccgttttgtgcgaactgaagctggtgagcttcgcgttgtgatgaagatagcaaaacaacttacgaagcaaagccgccctaatattgccgtgacttcgctagaccactacttatggaagtgcgatgcatcaagagaaacactccagagagtccgttatcgataacggagccgtacgaaaattgccgtttgagtaatcggtagtgactgaaggagtatgcacatgaagggatagtagtacgggacacgaatgttgcatcgcagtaactttttcgatgaggctttcgagaccatcaacaactttgaagccctactaccagtatgagttgtacagtgcctctcacccgctacgtatataacgattgtggtgccaaatgatctaggtttgaccaggttgcacatgcactacaaccccatccgcctcaacagtcatctgaggcgttccgcaacaacgccaccggtcttacgaaacatggagcgaggcgtaaatagctacacgccgatcctcggcacgtagacacacctccattccttacgaggtttttatgcataagcgattggaagtaaaagtacgttggtgcatacttaccccgttcgctgcggcaacgtttaacccaaagttcctctgctgtcggcaacgttgcggtcacaattgcggtgcgacggccaaagtacagcgtttgtgcgtttcaaatgcaagctatcgcggatcgcaaagcgcgtagccatttcattttgcggctgcatcttcaggcgtgtgaggcccgctggctgctcgggagcccgatgatgatgtactggaaaccagggtcgacgcgttgcagccgcagcatatgtgtccgcgctcagagctcgaggcgagacgcgatccgcgccgcgcatttcgggttatctgtcgggcagacgaacgagcagcgatcccgactttctcttccgcctcttgtgttggctttgcacggcaacgatggccgtggcgcggctggctttttgaactgacttgcctataccggtgagccaatgaatccgggaagtcacgcgaacggtcacggcggcagtaccgtggcggtgtggcgttgtaaacagaccgtctgaaacgacaggaaacgccggatcattggtaacgcgccatctcggcgtgcaatcccccccagcaactcggcatttggggagccaacatgcactacattgaggtactgggcgccctgtttcgaatgcatggaagacgtctacccgctgacatttttttctaggcatgcgacctctcggtgatttaccacatctcgtccttcctcgcttagaatcgtgactgggtttcagtatgctacgtggaaaaggggaattaatagttggctaccggggagtaacaaagggggggagagttggctggcgtttgccgcgcagataaaagcccacaaaccgaagaacagcgagaggagaagacgagttggcgggcgtcgtcagtgtcgctccttccgtcgcgctctctccggtccctcgcgttacccgaaggcacggccattgccccctcctccctgcgcggagaagacctaactcccctccacagccacagccgcagctagccagccgccatggacgcctacgagcaggtccgcatcatcggcaagggctccttcggcgtcgtcacgcagatcgtgcgcaagtccgaccgcaaggtgagctgcgacaggcaaatacgacttccaaccgttcggtgggggcggcgtactgatatgtgtgtgtgcgtcgcagatgctggtgtggaaggaagtcaactacggcgccatgagcgagaaggagaagcagctcatcgtcagcgaggtgcgtcgtgcttcgtctacaggtggagcagactctttttgggacgtaaactgataattctgtgggttgggtgctgcaggtgaacattcttcgtgagctgcgtcacccgcacattgtgcgctacctggaccgagtgatcgacaagcaggccaccaagatttacatcgtcatggagtactgcgagggcggtgatctgggtcagttcattaagaggaaaaagcgtgaagggtacgttggcacgtcacgtccggatgtctatctcaagagcagcatcttgcatcatggttcagtgtgtgaaatctgacttgatgcctttgtcactgtagctcctacatcgaggagggcttcatctggcacattttcacgcacattttcttggcgctgaaggagtgccaccgtcaccgcgaaggcaacgccatccggcccattcttcaccgtgacatcaagcccggcaacattttcctagactccaacgtacgactgcaatgcaggattttttgttgtctacactgtgtctcactccctttttactaatgcacagaacaacgccaagctcggtgactttggtctcgccaaggagctcagcagcgagtctcgcttcgcgcagacaaacgtcggcacgccctactacatgagtcccgaaatggtgaatgagatgacctacgacgaccgttcagacatttgggctctgggatgtctgctgtacgagatggccacgctaggccccccgttcgatgcgacaaatcagttggcactggcgaagaagattaacgctggcaagttcacgcgcattccgtcgcagtactccgagggtctcttccaggttatccggtggatgctgcacaggcaacgctcgcgacgaccgagaatcgaggacctggagcgcgtcccacagctgcagcagagattacgtgcgtacgctgcggcgaacgccccgcagcccgctgctgatcagaacttgcagacgtcttacaaccagaagatgaaggagctgttaggcatcgaggaagatctccgtcgccaggaagctgctctgatggctcgtgagaagaagctgaaaggtacgaactcgtgcatatttttaatcatgaccaactgctaatgattttttgcgtacagagctggaggtggactacatgcgccgcgaaagcgagctgaagaagcgggaacaaatggtggagatgatgactcgcaagctttcctacaatcctgccaaggtcggatctcctacaacttcagatgattccaactccagcgcagacaacaactttagccatggcggatctcagagtcccaaacggcgaggagacaataacagcgctggaagcggtggcagcccccctccttcgagtcgtaacggtcgtcagccaacgctagcagatttccagtcccaatcgtcaggagacctcaacgccaaggtggaggaggcaccaagatctacgcgcggtggctaccctgccaaaggccagagcagcccttactacggcccaacgggtgatgtcagctcgactccgtcgacatcgggaaaccgtctgcgtgacgcccccgagcaagtcgccaacctggtaagtcaaaaggtgtgcatcgtggtaagtcctcgccgcggttgagtccattttactgactttcatttctgaatcgtagatgaagggaatgtggagaaagaacaactagctgactacgggcagccccttcgccacgggggttcgaagcggcatcagttaatctagtctgcaagatggagcacgagcacaagtgtgagcagcggaggggatgcggtgcgacagtaacgtattatctgcatgtgttttggtgtaactaatcgacaatgaaggcacacagttagcgacaagctaatcaaacgcctttgtcgagtcttttcaccgccaagcacgcaccgccacgcgccaccactatttgtacaagatattcagccaaaacaaacaaaaatcaaggcgtgaaatccagctgcactgccgtgatgccatccacgacgacgagatttgcaaaagatagagagtccgacctgagtgtgaagatccaaccggacagaagccgtgggtaacttctggttccggtggttcagcacgcttcgaaacgacaaggatgaggtaggaaggaaaacagtaagacttgataaattctttcgttatcttcgagcgactgcctgttccgtctaccagaatgaatttcatcacacgtggtcaaagcttagcgtggttcagttccaattgttctcgaaactattgtattcataaatgacctgctttgctttagtacgcacgctcacttgttttcgtctacttcggccttagtatcttcctcagattccgtggtcgtagtctccttcgcctccacgcgaatctgcagcagtgcttcgacacgcgtccggcagattgggcacgtgcttgaactcttacgcagcgcctcagcacactcactgcagagacacatgtgccggcacggcaaaatggtcgtgttccgcggctcacacaagcaaatgatacactctgcgccttcgggaatctcaatttcatccttgggtgcctgagctgcgtcgatggtgccttcgcctgctgcgccagtgcgttcagtctttggtgctgcagccaccataccatcgatgccgtaaatctcctgcaactcgtatgtcaatccatccacctacacgcaacaaaccgcggtcagcgcttcaaacataacaaaacccataaaaagttgtctatgctcgtaccagaatcttttgcttgagcatcttgacgtcccaagtgttctcccctttcttgacaaacgtgcagaatgttgactgggactgagggcgtttccctagatatcaagcaatgcacgggttagaattgagatccagcaacaacgagtgcatcaattccacgcgcactcactgtccgatgacacttccagcacaacgatcaatgggaactgcactgcgccgggtttgtacaccagctcgtcagggtcgtacatcgagaagttcaagagaggcaaaggctgctcgtgcttctcgtgttcctcttccttggacgcatcgtcttctgtctctccttccttcagcacgaagatctggcccaagcctgaagggaagtgctgggccagcacggggttcttgtcggcgtgaaccaaggcaaagctggagctgccagtgtccgcgttgatggtctccgttgccaccaagaagacactgatgcgacagggcttggtggcatcgaactggaactccagcgcgtagtgatttgggtcggtgggcgactgctgcagcttgaggctggccttcttgaggttcacgtggttcttgacagtgcacgtctgctgcagctctggcacctcaacggggagacgcccctgattggacatgaaggccatgtccggccgccctcggctcagatacagcgcctgcatctgcgccggcgtgtagctcccgcgcggggccgcagtcgcacccgccggctctccatacagcgtccctgtcgagctgcggcgctgccgattgacgctagccgtgtgccccatggtgtcgaatgtgtgttgtgcagtgcaccagcgtctttggcggttgaagctttttatatgggtcagaatgcaggactttgtgcattatttgcgaatttctataggcttggtcctgatgacagacagaactaagcttacatctaaattacggctgcgctttgaagtcctcagacatcccccacgcattggcgccctcatcggcgtcggcattccacatgaacgaattggctccatctacagaggtacgacaattggtatttaacgttagtaaaaggtgagtgcacgaaattaagcacagggcgtggcaacgtacatttgatgcccttcgccggaggacagccgccgtgaagactactcggatccaggtcgttcatcggcgtctgcgagtagaacaacgacgccgtgagcttcacgggcggcactgcgagcccctcggagcactcgtccatcccttcacgctcgatcccagtcaccagacgctctttcgaatacgggaatactgtctcgccaccttcggggcagtcgttcaagtacaagaaaagtgttgcgaaccgattcggctcgaagtggtgcaagtgcttgggcttctcgtaggcaaattggccgccagctcgcttggtccaagcctccagaactaggtcgaatccacgggagctttggcgcagaacctcaagcaaaacgtctttattgtctttgttttccacaagccacgtatacaactcgttggaaagcgcctcgacaagttgctcttgactgtagtcttcgagcaggtagttggccatgcggttctggaaactcatgtaaaacgtcggatagtcttgcccttcaggtctcacactcttcggaacagcttcgatatctgtgtccatcagcgtctgcacacgttccttcgcccagcgtatccatcgaaagtaatgcgtgacgccactaacaagcaactttgggaaagagtacaccaaagcagcaagccccacacgcttctcccacgacgcaacgatgaacggcagcatgtagcccttgctctccaaaattgggcccatgatgtcgtctgctccacgttcaagattctcgtcaatccaatccccccacgccatgtctgcgtgctcccagaagaagtcggtcgcttgagcgtcttccatgaaacctctcagcagcgcttgctgaaataccgctgtactcttggcatgcgggaacattgcaccaccaggtaggaactcaactgggacgacatcgtcgccatgctcctggcggagctcctcgattttggacgaggcccaatgagtccattccacgaactcgccagcagccaagtgcttgcttggtacaaactctttcgagtcaaaatagtcctcgtgcttgcggaagaactgacctgtttcgtacctcacaagctgcagcctctctgtatagccaggagacgggaggcgggcgatccgcgctgatcgctcgcggaagtctcgcgtgaagtggctgtcgtccaggaacgccgtgaagcttgttcggtctgagtggtagccatcttctgcgtcgacactgtcgactggagagcgcgaaagatgatcgatgccctcggcgatgatggcgtccgcttcctcctgtgtgaagaagccttcgaccgtgaacaccttcgggcgcagcgactgggtcgtgacagtgcacccctcgatctcgcgcacgtagcccaccttgattccaggccagacccatagctgtccatccaggagcacatgcgcaacgcgctgtctatccagctcgtttgccgttaagatcggcaggccgtcgacggagaagaggctcagcccgttggccacgcggtcagcgtcggctcctagatgcagcaccgccgtctgagcgagctcaaagaggcacgcctccccatcctggaggtgtgtccatggcacgtagaccccgtcgttctccccgttcagcatgaggaagactcggccctgagctcgaagctgctgctcctggcccagcacctgctccatgtgcgtcaacccctcgtccgcaggcaggaaatcggcgcaagtccaacctgcagcagcagcggcgagcggtgggtgcgtggcgatcttcaccacatcgctctcgtacttgtccacgagcgggtcgtccttggatagcgcagtcagcggctgggcggattccgtcgacgtcgagacgccgcggtcgggcggcagccagtcgggcgacgtccaggcggtcgcgagcagcgccacgcccacggcggcgacgagcgccaccacgtggctcgacagcgaccaacgcggcgcctcgcagctcggcgcggcctgcgtcggcggaggcatctgacaacttcaagcggcccgcgttttcgttttgggcgcgttgaggcgaaatgggtaaaagggacccattttccaagcagaaaatcttatgttgaagtcgtgcaacgccacgatacaaaaagcggctgaccgtgccagaagtggctctgtacgctgtcggtccaacccgcggctactcgccaagagaaaagcagttcggaccattcgccggcgcttacttttaaaactatcttgaaaacttgctatgaaaaaggagtaagactcacaaaccagcgccaggtactaccgaactcgctggcgcaagataaattagatactgttcgacaaggccacgtgacaattacccaagcaatataaaaaaagatgcttgtcacgtagccttgtcagacagtatctaagaaaacaaaattgctgggaaatatgcgctttcttctaaaataggtgatgttctgtcatgcattcttacggagcgttaaagcttcatccgtctagtaaagattccacggtagatgccttggcccagcaaaattagccggcttttgcaccctttttggcggcccttttcctgcccatttgggcccagtgtgcgtgagacaagcctgcgcatcgccaaagggacgcgtcactcgcctgtgattggtccacgtcccggccaaaatagcacatagtatcggaaatgctcctagtgtgcacaacatgtctttcgcaaaatactaccacattattcaaatacagaggtcgtaaaaacagttaccgtcttgtgcagatatctgttcttaaggtacatgatattccaggtcaggttccgagtctggtggtgttttccagccaaattctggtgcgagcgagcgtacatggaaaccccatccggctcccatccggctccgtgaatcttgttgcagcggcaacaccacccgcgccagcgcatttccgctttcgaccgcgtccgtgcagaagctgcgtatcaagcccccactccgtcccaagccaccatgcagtccgccgtgctcaagacctgccgccgcgccgccgccgcctcgggccgcgttcgctccgcgcgcgcgctgaccacgtactcgggcggccagccctcggagggccagggcggcttctacggctcggccaagacgcgctccgaggccacctccaagttcagcccgggcgcgcgcgccgagccccaggacctgaccaagctgcagcagctcatgcagcagtgggaggcgcagaaggcctcgctcgccgccgaggagcagaagcaggcgctcgcgcggatcgccagcgaggaggagacgctcatccagcggttgctcatccggggcgcgcccgtgtggggcctgtccacgcagcagcgcgagttcgtggccgagtgcagcaaggcctgcccctaggcgcattgcgtatccaacccgccgaccgtctgccatcgagaaggtttaatcgctgcttggcagcaagcgtcgtcctcttgacctctctatcgtcgccattcgctcagcatctcggaggaataaaacgggatgcgagctaggaaggcagcgtgccggttaatgtatcagtttctttctcgtttcatggaggataccgtagcttgttgccaaagctgtagctgtagacttgcagggcgcagacgcgcgtttgcgcgagccccattttggcgagggcggccagaccttgccgggcatgtacctgggcagcaccatgctttgttttcgcattcgtgagtcgaagcgaaagaactcggacctgatccagacgtgaggattcgagagcacgatttgaagcacgccaccaagcagactttgccttgctcgaatgagtcacatagtgacagcttcctccagccttgccggcgcgcttggcgctcctcgggactccggcgcggccgcccatgagctgtatcttggtggtacagccaaacatgagaggaggcgttgccacgtcacatttgtacgcatttcttcgcgcatttgagcatctccactgccgctgaggtccaaagcgccaattgtctccgctgcagggagtggccaagtaagtacctaggtaggtagacgaacgccacaacatgtattacagttaaggcgctcacaggttcaggcgggtgatcgacttgacctgctggcggccgtacgtgggcagatccagagaccgcttgcgctgcatgtctggtagctgtcgcacttcgtcatgatcgctgttcgcggacgcttcgctcacagttcgcctcaatgatggcgggtcggttgccgtcgggtccagcaggtccgatagcgctgctgttgctaccggctcgctgccttgcttcgagttggacgcgtccattacatacattcgcagcgtctccaatttaacgtccggcgggctaaaggtcgacagcatgtccccagctagctcggcgggcgcgggctccgttggttcggactcttgactgccatcggagtcttcatctgctgtgctctccgtaaaccattctgtcttcaacgagatgtcggtgcgttggctagctagcgccccgagctgagctactagtcgggctcgaatgtccgggtgcaaaccgcttttcacgatcatcttatggtaaatctcgcccgagcgtgctcgtccagatacaatagcgctcagccactccacaattcgccgaaattggatcacgttatcgttgcaaacgtgacggcgaaatagttcaaacagctcgggatactctccgagcaagcggtgcttctgaaccgcgagttgttcaactcgtcgacacatctcgttgttgacctcaaacccatgagtgccagcagagtagcaactggtgcacagctcatagttcacgcaggtgctacagctccactttgctccaacgatggggcttattccacagccattgcagagagcatcttcgtgaacatggttcttgtggtatcgagcattaagcttggtcttcacgtcgccaagcactgcacccattccagtcttcagtcttcggctaaatactcccccgctaccaggaccggatcccgaagcatgaaatgaatcaaacggaagtgaggcctttcgactcaacttctgggcggtacgggatgacggcaacatcgatctggacccggtcatactggcaccgaggtcgatcggttccgatatgaaccggtctttcgacggagcgagttttcggcttgcatgaagcaccgacggactggaagcgtcgctctttggcccgtagaagagatgatctttcgcccacaacagcgatgaactgggagatgcagaagtgccttcactagttccgttgtcactcgaggcttcaagacgcatttcatccttgtgtttatgatcaagcgtgatcttcaggtccgacacgggaacgtatcgtgtgcggacatacagctggacgttaagatcacggcggttcttcagcagcggaacaatcaaccgccgtatatcgcggttcacttcttcgttgagactttcaattgaaacctcagggtggaaattggatcggatgtcacgtccttcgagcacgaaacccaaccatttcgaaatcttctctcggcccttctcaggcatgctgcgaattagtcgctgcacaacctccgaatccatatcgatcggtgcaactgggaacacttcatcatccaacttccactcactttgcgaactcgctgaccccgtgctgtcttggcgatggatggaactaacgctggaaagtcttgttgtgtcttgcgaaattgaccgtctacccaggagagaggttcggcttccaccacgaacggagcgtagcatcttggttttcgcacccaccgcatccatcggtgcggctggatttccaagaccttgcagatgggcatcgaattcacggagcttgtgttgcaacagctcaacctgggagtcgtattcactgcgagaacgtgtcaactcttttgtgagttcatcaacacgctgcgtgcaaattttgagctcgtttgtcttcgccgccagctgctgccgaagaagttcattttccattgctgagctacatgcgcgtgatcgttccggcgatatgggcacagatgatgcttcgcctccctcgattgaagccaactccgaggacatgctatcactcgataatggcggcgcctcgaccgtagttcggcgtcttgctaacatcaggctgaggtcttcacattcttttgccttggcctccaattcgctttccaaaaacgtcacctttttcgagaagtcttcatttcggctcacgatcgaagcaacttcttgctctttttccaggagctgtttgttctgggtttcgagttcagcacacctgtcctccagactggataattcagctgccttggaagcctggtcgtcttcaagctcctccactttggccgcgaaaactttcagttgctcttccactgtagactctgctggttcaatggcgtcgcgcttagcctcgcgaagtaaagcctccaacgaagctatgcgcctgtccttttcagcgacaaggatcttgtactctgccacggttcgttcttcgttcaccttcggcttattcttgatgttcttcgcgcgagtgccaaaccgcaaagtggatattgtctcctcgctgttatagctactcgagctagcacagacgaggagagtcgtctcggagtttcctcctagtgagtcttgcagcagccgagtgagtttggagtcgcggtacgggatgtgcatgccagaatgaccactagtcaaggcattcattacactccccagcgcgctcagcgatttgttgatgtgctgtgcctccttcagcgtttgacctttggcgtgggtctttccaaccttctccgatccagctaaatccaccaggaacagctttccactcttcatcgacccagtcgccatgttccgttgctcaatagtgatgatgaatacagagtgactacgactggattcattgttcatcctcgtagacgaaataactcggttggctccccccaaacgcatgacctcctgcatttcctccactgaggcacagcaaacctccgtcgcgcccgcgatccacacacctcgctcgcgactctcgcggacgtttaagtttgtcgacgttggcttcagcaggtcgcggattttctccatgtagatctcaatgtacgaaacccgcacaatgaactcgaggtctgcctgcatgttctggatgccgtcgaagatgtcggccatgacgcgcgggatgataccctcaaagtcggcgtccccgggcacgccctccatcgagaaggtcttgcccgagcccgtctggccgtatacgaagcatgtgcagttgtagccgcgtagagcggactccaccagcggtttggcggtcgcctcgtacacttccagttgtgaggacgaagtgccgaagacctggtcaaacgtgaaagtgtggtcgtccgacacgccgcgggcctcgctgtgcacgtgcgcggcggtgccgtcctgcaggcgcacgcactccacggcctggtgcgtctgctccagcttgttttgcggccggaagcgcgcgcacacgcggatgcccgcgcgggagtctgcggtcgaccccatggtcgggaaattacgaattgaattgaaatgaatccaaagttgatgtcgcctgattccgacctgatactcgctagtcgcgactgctgattggcatacaggttgcagcttttaccgtcatgcttgcggcaagagtctgttaggcggtgactacattattagtggtgcctggcactcgaccaggaccacctggtcatcatttttctatagctctcgcggtggagacagcctagagattccagtctgcttaccagtgggccggctcctgggaccctagggtcgagtcgccgtcgctcgaagttcccataacttatctgcctataagtatctgcgtcgtagtcaaagaaatgccttctgctatttctcgcagcgttacaatgctgaactcgagcacgaacccccgggtacttcgttttacttcgcacaacaccttctacattgtacactcggcgcccggcagtgcggttctatccaactaaatgagatgttcttgcactgagctagttacatgtaggcgagccgcatgtactctaatgcattccaatttcgttcaaccggaagtttcctcgtggtcggtagcagcaagtggagaacatgtcacttgttccctgcacggttaattgccgtattgccatattttgcgatgattttcgcaaggttagcttggttaagttaaaatggaagttgctagcgtacataacgtcgcttttcaacattgggtaaggtcatgcctccaccgagaatgacatcttgactcaagcaagacttgagtagcaacaccaccagaagcagcagctttcgccagcattttctgtctttgcctcggcctgctgagcgcagattagaaaaccagccaaacgctacccatcacacatcgccaaccccaactccgcagcctggttttagtatgctgcgcgttggagggttgagagcacaaggggggggacttcgcgtttttatgaattctatctcaaaattcggaaattcggtcttccaaacgtgaggtctccagcgcatactggtggtctccccattcgtagcctggaagcgaagcaaacaaaccgtagcccgcccgccccccagaagtcggcaagatgatgtccaagctgagcctcgtgcgccagccgctcacccgcgcgcagtcgtcggtggcggcggccgtgtccaactacccatcgtacgtgctgaacgcgcccgccacggaggtgacgacgctgcccagcggcctgcgcgtggcctcggagggctcgcacggcgagacggccaccgtcggcgtgtggatcggcgccggctcgcgatacgagaccacgcagaacaacggcgctgcccacttcctggagcacatggccttcaagggcacgagcaagcgcacgcagcagcagctggagctcgagatcgagaacatgggcggccacctcaacgcctacacgagccgcgagcagacggtgtactacgccaaggttttcaagaaggacgtgccccgcgccatggacatcctcagcgacatcctgcagaactccaagctggacgaagccgccatcgagcgcgagcgcgacgtaattctccgcgagatggaggaggtcaacaagcagcaggaggaggtcgtcttcgaccgcctgcacgagaccgccttcatgggcaacggcctcggccgcaccatcctcggccccattgagaacgtacgtggtgcagaaagattagcgggcagaggtgcttgagagcgagtcctgattgaccgatccactgactgactgttgctgttgttgctacttcagatccgcaacctcaagaagtcggacctgcaggactacatcgccacgcactacactgccccgcgcatggtgattgccggtgccggtgccgtggaccactcgcagctggtggagctggcccagaaatcgttcggcgacctgcccacgacccccgctgtggcccccacgctcgagcccgtgcgcttcgtcggctcggacgtgcgtgtcaaggacgacagcatgcctctggcccaccttgctattgccttcgagggcttcagctggaccagcgagcactcgttccctctgctcatcatgcagacgctgctcggcagctgggaccgcacctcgggcgccggcatgaacatgtcttcgaagctgggccaggtgattgctgagaaggagctcgcgcactcgtacatgtcgttcaacacgtgctaccaggacacgggtctgttcggcgtgtacgctgtggcggacaagtacaagctcaacgacctgacgtggtacactatggaggcgctggtgcgccttgtgcacaagaccactgacgaggaggttgagcgcgccaagacgcagctgaaggccaacatgctgatgcagctggacggctcgtcgccgatctgcgaggacatcggtcgccagatgctgacgtacggccgccgcatgacccccgccgagatcttcgcgcgcatcgacgccgtggacgccgccgctgttcgcaagacggctgacgaggtcatcaacgacaaggagcacgctctggctgccactggccctatccacgagctgccggactacaacttcatccgtcgtcgctcgtactggctgcgatactaagcgggtcgtgtcgcccctacatcccaacgttgtcaaggagggaggctgaggcatagaggctgaaaagacataagcagagttgagttttctgtagggaaagcggacgggccggacgccactttgccacaggggaaaaacacgaacgaatggaaagcaaaaaatgaatcgactacataacgcggtgtgttcatgtcatcccatgttgccctgccatttcgggtcaggtcgtttgccaaggctggtgtcgatggtaaatggctgagtttgatgcagtgagcctgacgtggtgaacattttcccaaaagctgcgattcgtgcgcgagttgaagtagtaccaagccccaaatcctgtgtcgaaaactttttcaagattgccaagctggaggtctttcaagaaaagtcgctgagctcgttggcggtacattgtctggatggtcttcgcggcggcatctaacacggtatcattgattgtagcgcggatcgatggatcaggtgctcgcttctgctgggcgccaagcaggcagtgacaacggtgcagtaaccttggggcttcccactgactcaaccgggtggtgcggttgtagtagaaacattggttggtgccaggatccaatacgcgttgatacgtccgagacagtagatcggcgagacgacaccgtgcctgaaatgctcggaacaaacactggatcacaagtactgctgacgcaatgttcatcttgggtggtgcagtggccgcgatttctttcgtctgtcgacttgcatcaagcgttgacaataacagctcgtcttcatggtaatcaagttgcttcgcggtgcactcgttttgctcgggaccgccttgaatggaaagctgactcgaactaggcttaccccctagctctgcgattcgctctcgtacctgcgcaaggcttctctgtgttcattttgattttacggtccaacgctcgaagcttgtaatgaatctggctttgaggggagtcactgccaccagggaaggatgcgagagtttctcgcggtgctcgctgacgaagaaaggatgcacagcgctcgtcagaatcgatttctgctagaagtatcgtttcggttgcttcaaatgtagcgaggctagcattgatgctcgacgcccgtcgctgtaagtgaggcccaaactccaacgtatctctttgtggtcttagagtcccattccacgtcatacgcgtccgcagtggtgaacttagcttttgcggcgagggtatcatgggtttcatcaccaagtggggaagtatcatctcgtcatatgcgtcgaccgcacaagcccatcgtttcacagtgtgttgatttcggctttctcccacggcacgaaccttttgcgataaatgggcggtttggttatcgttctcgccggtattgctccagtgcagcacaggaagtgctacacgttcgatactcgtgtgacttgtcataccaatatctttgctagcatcaggttgcaacgtcgtccgtgcgccgagccgcgaattcatcgtaacgctggaaactacagtcctgatcccatgattcggagaaactcgccatttttagtcattggccagctcataaccgtgcggctacttgcaggagctgctagcataagctccaaatagtttcttactgtgcacaaacaaccgcattcctgaactggtgctgctatggccgtggacgagtttggtcgcgagcactacgtcgtggaagctccagctggtcggctaggcgtcttactcgttgaaaatgaacgaggctttgtgattgttcaagggtttggagacattccggcggatcaagccccctcagccgagggcgacaaacaccggctatcgatgatgcgccaggtagttcgttcgggagatcggctagttgcaattgatggcgacgaagttgtttattctagtctatcagaagtcatcacacgcctggggaaactttcggcaaagaagcgggagctgaaattcgcacggtatcaccaaccacaaagctccatcaaaacctatgacccagaaaaattggttttggttcgtgctcctagcggtccactcggcttgattctcagcgacgccttgcagtacggtgccgtcattgaaggtttccagcagcttccagatggatcggaaagtcatttcaagaagtgccacaatgttcaccgtgggtgccagatcgtcgatatcaacggtgtagacgtatctgggctaccgcgcgaagaaaccacaaaggtgttggcagaaatgagagaacaagacaaagagatcagtatgtaccgcatgactccaaatacctgcgctcgattctcacaactcacggtcataacggaagatgtgggcatcaagttcgtcgataccgagaactatcgctgtgtggtggctgcagctgctgggcccgacgtcgtggaaggtgacatccttattggtatcaacaccaccgacatcacgggtatgagtcgagctgccgccatggacttgctgaatcaaacgccacgcccccaaacgcttactttctaccaccccgaagcagcacctctgccggaatgccacgcattgctgatcgaggcggggccatccgggctgaacctagatagcagcgatgctgctcacgccaggattacggggtttacttcaccagaatatgctgatcgcccaacatacaagaacttgagtgattttatcccaggcagctacatcatcggaatcaacgggctcgacgtgtgccagcatacgctcgcagacatctccaagttgttttcaaagttaagggacacacccaagcagatcgtggtggggaatgcgacgttggtgaggcgtctagaacaaacccgggcggtagcagctatcaacgtaccccctggaccgttggggattatattcgatggcgaccatgcagatgtggcccgtgtggcgggattcaagccgatggaagatggaaatccaggggttgtcgagcgaagcggccatattccagttggatcgcgactacaaatgatcaacaagatgaacgtgacgtgcttgacgctgaaccagactgtcagtttgctgcagaaactgtcctccgcgccaaaagaacttgtgttcctcacgcgaagtgaaaccagcaagtgcaatcctcgcacaataagtattcgagtcccacctggcccattaggcatcgatttgcgtacaaccgcgtccaacacggcagttgttgaccgtgtcaatgaggatcctgcgcgtggccccactcacattttcaaccacggtggtgttgtcagtggatccgaaatacttgccatcgacagcttcgacgtcagttcactggagatctcagaacttagccaactgctgcggttgtttgcacctcacgagaagattattacctttggcacgacggcagacgcgtatgctagcatgttgaacgctgcacacaagccagcattgaagagctttgtcgtctcgaaatcccccatgggaatagagttttatagctctctcgaaaatgctgcctgcatcaaaaacgtggccacgagtgattttaacgaagagatcccggttggcagtcgcctcatcgccattgacaacgtcgacatcagagcgctgtcactgaacgagatcgtcgacgttctaaaatgccttgctgggctccagaagacgctcacgtttgacactgagcatcgccagagcacaccagcatcccccacgacgtccgctcccagttcacctacaattttgaagaagatattgaagggcacctcgtccgtcgatgcaaatcccgcagactcgtcacagaaaccttctttcttgactacagccaatgcatcgcacacgaaatcaacagttcggtttgccgaagtggagacttcacaagaaaccccagtgctcccaactgaagtaagtatctgcatgtctacgccgacaaacatcatcgaggtcaaaacctaatctttgtttggcatcctaggcatcgcactcgcgtccgccgccgttgaaaatcgaccctccttctgcgccgctctccgcgctctccattcgaaccgtcgaagcgaccaaagctgcgtccgaagagaggtcacccaacgggaagcaacaaccctccttgaactcgccaaagacgcaattcctgatcagtatggtacgtcgacttagtccattgccccatcggattccgacccccacgctctaacgccatcttgtcagacctcgtggtcaggctcccgtgaatcgagccgcttggtggtcgacaaatccgagaagtgtctacatatcatgccacttaatccctcctctccgcgctcagccaagacggaggtcattgcttttgccgatatctcggccttggatactgggaaggccagccctcccccgtcgccgtccaagaggggtctgttccgctcgctttcatcaaagaaggacttggcggagcgctaccccgtgaccatctcggccgaagaagccggcagtggcagtggcaagaagaagaccaaagtctgggagttcgacatgctctccagagcagagcgcgacgagcttgaagcgatgctcttgcactgatggtcgaaagccatttcgaatttctatagcctcgatacactgaccggacgttcgtaaatcccgatgcgaatacatatttcacctgcgattagcagccttttgttgcatagcgccgcttgatcagttcgttccaacgtgagtggaagcggccgagacgccatggctggcgagtccgcgtgcgtgttcgagggagactcgtccggccaggacacccccgtggggttccgagacacaccaggccaatggtacacggccaaccaccgcaagcgcgctgcgttgtcgcagctggagggagaaccgacgcaacgcgatagtcaggcaacgcaggaagcgacggaggtggcgacgcagcccggagaggaggatcacgcacctttgtttgtcgctgctacgccctctcaagaggatgacgaagatggagacgaggtggacgaggacgagacccagatccgcatgaccaactctgaagagcaggacggtgagtagcaaacgtgtttgttggaattgagtggcagaaaacgactaacgacgtgatatgtgggtgtttttgcattgccagctccaagaccagaacggaagattttcgaggaggccgtgccgctgccaatagcgtccatcgcaagcgagacgaatcgatcttttggggcaatggggaacagtgacgacgatgcagactcggacatgtcggatgacatgctggagcaagatggatctattggcgggttgtcttctatcgccgcttcatttcaacacagagaggaagacaaaccggttgcgaagaagagggtttacaagccccacacgcccttccgagcatcaccagctatttcaactcgggatgactcggacagcagtggcgatgaaactgagattgaaggcgagcctaaggaggaatcccccacgaaatccaaggcgagcaagaacggagcagtatctaacgacgaattgccgttacgactatccaagagtgcaagctacacgaaggcgactgcaacagagtgtccatctaaactagaagcgaagagtatacgacgttcgctgtcgaccccggaaaaagcgtcaagctcaagcttttcgtctcgaagcgttaaacgagatcacagcgcgacaagtctggatagtggcgaggcaaagtcgaagcgacctcgacaatctgagtcctgtgtgcccgcgcatggctcggatcaacaagcttctcaagaaaaacacgcagttgcacaggagattaatgaccaagtccaacaacaaaacatattgcccagccgtagctcggaacctgtcgaagatgccgcggaggaagaagaaaaaggagttgaagttgccgttgcagatcaatctcacgcgacgtcgcgacacaaggcatccccatcgagtcgtggccgtaagcgcacaactagcagtcgctccaccacagacagcgagtcggcggggtcgcaaacggaatccgggactatccgtgtcattttgacggggctggatccgtctgctgcaatccgcaagaagatcaagtcgatcgccggcgcagtctacgagagcaatatcgagagggccacccacgtcattgcccctcagaaccagctcaagcgcacggtgaaactgctgtgcggcatttcctgctgcaaacacattcttggcgaacgctggctggacgagtctgcgcgcgtgggtgcggcagccgatgagcaagcgaactgcctgcgcgacaaggaggcggaagacaagtggcagtttgacctgagaagcaccatgtacgacgtgcccgcagagcagcgccagcgcctttttgctggacacagcgtgtttatcaccaaccacaagtccgtgctgccaccggtgaaggatctcgtgaaaattgtcgagtgcgccgggggcaaagcttcgtcgaaagggaagcccgggccaaacgacctggtgatcacgagcgaggcggcgatggcggtggcagcggtgcgcaagcagcttgcgagcgcgaatccggagaggatctactcccccgaactgatcctgagtgggatcttacagcagtgcgttcaactggaccaacaccacctggaacgccctgcgatcggcaagacctgggctaccaagcgccgcaaataacggcaggcgatcagaatgaaactgcaagtgtgcaagtgtgcttgttggcggactgcttgtttgttattactaataaattggagttcctcatgcaactgcactttcacgaagtgatgcatgaaaaaataattaaagctactggtacaggtgggaggctggggtgtgctggcgcgcgcctacttggcggtctggcggagcccaatgagggcgcagcccagcagcgagacgacgcacatggacagcaggtgctggcgcgccagggtttcttcgatccacttgtccaagctgctgctgcgccggcgagtcaggcggcccagcgtgacctcgatggggacgtcacagtagcacacgggcgcgtccttggggcagaactcgcgctccagcaccaggtgctggccgcgctggtccgcgaacgagagcgtcttcttgggctgagccgagtagctgaccgtgatcatcttggtcgccgacagctcgtccagccgcgagccgcgtgcggcgccgccgcaggagaaggcgctctccttgcgcaggcaggagcgcttgcgctgcgtgcgcggcttcggtggagggtagtggtggtggtggcggcgatggccgctgccgtacgggtacttttggcctatggtcatgggctgctgcatctgcaacgagcacgtgctcgcgctgctcaagcacgacgagatcatctgtgacctagctagctattccgcaaatgagctcaacttgcaaaaaaaaggcaaaccttgcgctccatgcgattactgcacgtgacagattttggcattcgccgcttctatctcatcttccactttctcgcgcttggcgttctgccaagcttcaatcaactcgtcaattcgtttggctcgctgtcgtagcgcatgagggttaatcgctcggtgtgtggttccaggcaattgatcgatgagtgggcggaggaagtcaagttctggggccccagtttccccagccagagctaggtcaaccccaacagaaagaactgagtgccgatccagagcacgctctcgccgcagttcaaactcgggcgaagccccgccccctggtatgatcctcactgcagcattggtcttcccctgtgccaccagttcatccggaggaaggtggtcgaggagactcgggtctgcaggtacaacctcagggtcaggttcatcatcatcgcccgcatccacacttgaaacatagttgtgagctgcatcagtgatctggtcaatagggcttggtcggggaatgatcgtctcagtctcgctcgtctccggtaagcctacccctaaggtgaaccgagccgatgtggtcggttgggtggagaccgtcttagttttggtgtgtcaagctgctcgactcagcaccatcacactcgagaactcgcagccatggaaggcacccttactgctccacctgtgggcggcgctgaagctgaagacgctgctgagagaagcgtaagcggcacggacaccaacgggagcggcgtcgagagggcacccccgcagggtggaggctgtggtggttgcggggcaggtcgcggtggtcgtggaggacgaggagcttcgaccaggccagctgcatcatggagcgatgatgatgtgagcgagttctttcgcctccgttacgcagagttagctgacaacttcaagaacacgaaggacaccaagcgcatcaaatatgcgtgggccgtcttagcatcaacactctctgttaaccagagcaaagtgttcactgaccagcagtgtcaacctgagattctgtcgaaaccactcgtcgtagaccgcgtcgtaaagcatagcctcaaactctagcggtgtcagggtaaggatgttctgcttcgggttcgaaattgcccacacagcggtgtggaccgccgtcgcgagagcccccgtggccgcagcaactgcagcaacgatgctttcgctctgcaccatcgaaacgcagtgaagacgctcgtctccaaagtgagactggtgatttagtcgtctcagattggtcagtctggagacgatgaacctagccgatcgagctaataactggccaatcaaaaataagaaaaaatgtcgccacatcgtctaagacgatcgaaagccgagacgagcgttccctggccagggccaaccttgccatagcccttcattttcgtgaccaactccatgcaagcgtaaaaacctggcatgctagtagtcatactctcgatgttcacactttgataccccagcttcttccctagagctcgagctgacaaatttaatgagccatcgatcaccaagtagcaatcgataacccctgagattaaaaaaatagctcgtcgtgagagtgaaatcgagacagcttctggcaatcatactcacacattttggagtggatgcagatcgaaaatttctccacgaaaagaacatgagctccattccgaatcaggtagttcagagcgcacctgcaccacgtagtgtgcgcgttcccgtagtcggcaattatcgtaacactcactccacgctccatagccacaatcagagccttcgccacgaggtacagagtgaaattaaagcaaaaaatcacaatccatcgccgcgagaccgagatgtacagcagtagcctcggcaggatcttatctctccccatcacagtctcctacttgatggtcccctgtatgtcgagctccatacccaaaaacctccgaccctccgactttctccgactcgtacacaaaacatgcggataggaggggggtcacctttaactatcacccagctacgcgctacgcgcgaacctaaaacccctaaaggctcgctgcgctcgctgggccagaaccctaagcccgctgcggctcgcacgcgtcgcctccgcttgctaggtagagcactgctgggtcctgggtttgcagccgcgtgctacgcacacggactgtcaaaccgcaggcgggggctcgctacgctcgctccgtgccatccatcccaaggctccgaccaatgagcaaacgggacgactaatctatcttggactgtgtatgcataacactttgggaaggggtagggtaatactgttatgctccgaccgcgcttgactggggatttgtatacctatcatcttaagtgcggtcggagatttgatgatattctaccataagaaagtcaggtttgtaggttttgcggtagtttgtcacttcgagccccagcaactgtgctatcgcatcgtcttgcaagccggcggtggacgtgttgcccttccagcggtacacgaacgtgtccaccagctcggctatgtccttccgcagcgtcccaggatggggggcggcctcgtggcgcaggctccatgcccgctgcgccgtcgcaaccgtgatcccgagcttctcggcgaccgcttcaatatcggccgccttcgggaggaacctgctgttctccatagcctccttgtagacggcagccacgatctgccggcccgctcgccggcgcgcgtgcccttgcccctgccgttcgtcatggccaacttccagcagcgctttttctttacagcgacccttcccgggttctctctcattagtcatatgactaatgagatagaatgcgcgactacgtcgattggctgaaaatacggagcctttcagccaaccataatggagactaacaactgttcggctcacgtcaatttccacgacaccattattgtgttggctgaaagtcggcgctggtcccctctgattggccgaaaataataggtcacagggacccagaataaattacccgtaaattacccgtcatttattttgggtcacattattttacaaccttttttttggggcatctcgctcgagattccagttccagagttctaggatccaagttccaggatgccgccaaattaggacacagaatgggtgcataggcggaaattggtagcacttattgaagtggcacagctcgcggtactgcttgataagcgacagagtaagtccacaggcgccgaagttttgttgataaactagtagtggagcatctccgtctcgttgatcaacttgcaacctactccgctaattgcaggcacgccgtaaagccacgtaatggagggcactgctgttgcacacggcccatgggcactaaccacgcattattcttcgcagtattcccagcgtgctgataatatgactgcacacgttccctaacatcgatgtatcttccctctgccggggtgtcgtgacgtttagaacgactaacattgctaaaagcaactgaagaagcgaaatgtaaattctaacgttagttgcgcgctcgtaagcgtacgaccacgagcgacctactcacgtgtgcttgattcttggcttgatatccccatgatagtactggctcagatgacgttcaacgagcactactgtgtagtgccgcgagtacggttgagctactcgagctcgactgagccggcggatttacgtgttcgcaacttcaaatgggctcatgagattacccacttgtgtggtgcaccttagtgccggcggtagacgaaacatgccgtatctttgcccgacttgaagctcttccgccatactttaatccagtgcctcttgacgtcacccgagcagggaccgtgatgcccagccgagcggcaatggcggcgctgcggaggtgccagctcgccttccgcgcaggacggtgttgagaagcaggcacgagcccctcgccgctgcccgtggtgatgcattcgcagtgggtttcgtcgatcgcctcttcgcggctgcccgtcgccaagcagctttcgccgcgtcgagaccgcttgtctcgcggcccgagcaatgtgcccgggcgtatcagctcatactttgcttggttgggaggcgtccgcgctgcggcgcagtctgcgcctgggggatgcagagcgagcgcttgattccagggaggcgttgttggataacggagttgcaggtggcgacgctagaccggaaggaagctccggcaaggaagcactgctcggcttgcgctcgcatgcggacaagactagtttagcttgagtgcgcgggtcccgcagcccgcgcggttttcagaacaccgcagcacgtaaaaattatctgcagcatgcgcaccacacggggtgtcgttttccctgcggcctgcggaagcgcttggctggcgcgctagcaggctacgatcgggtactactacaacgtagtattcatcaattggtttgtcgattccgcttctgaattattagtcatttagctacagctcctgtcgagcctcgggcatctacctgcgtcgccgattgccgccaccgggctgctcgaggcggttcttgtcaaagtcgatgtgctgctgcagaatgccgctcaaaatgagctcggccgagtagatccgctgcgggttcgcctgtgccagcgccttccgaaccgaggccatacccagcgcagcttcactcgtgatcaccacatcgtcggggccggcgctgcctttggtcactgctgtgccgccagcacactccacgatcttcaccaggtccttcaccggtggcagaaccgacttgtggttggtgataaacaccttgtgacctgcaaagagttgccgtcgctgctccggcgtgaagtcgtacatggtcttgcgcaggtcaaactgccacttggcttcagccttcgcgtccttcaggcaatgtgctcgctcatatataggggcacccacacgcgccgactcgtccagccatcgcacgtctagaacgtgggcgcagcgcgagatcccacacagcagcttcacggttcgtttcaactgattcttgggggcgaggacatgggtcgctttctcgatgtcttcttcataaacggcccccgagatagaatcgatcttcttccggatggaagcggtgggctcgacgcccgtaaggatgatccgcacttcttgggtcgtcgcctcgacaccgacctgaacttcattgccgggtaactgggtcgcgtcagtctcgctcattgattcatctgtcggaatgctctggcttggttgagttggtatcaggtcagtgtcattgggatcgtccgacttcctcatgagccaccgtctcttcggagttttcacaggcggtgtagcaacatgcgtggatttgtcatccttcccagttggggctgcgcttggcgtcttcttcgacgatctgtcggatgagcgcctgggtctctttttagccgaaagtgcagcagcttgctcctcctcgacgcaatttgctgtagcgctcttctccaagtctccacactcatcatccgtcttatcatccggctttgagccacttgaggcagccgagctagaattagagcgaggctcctgtgctttcttcatatgctcagatgggctttggtcgctggaacatgtggcgagcttccgcttcgttcctgcttgtttgctgccgtccacacggacgtgagcctcttcctcctccatctcttccctctcctttctctctctttcagctcgcctcgccgcgatttgagcgctctcaacagctttccacacttggtcgaaccaaaaatcaattctggttcgcttcttcgatactagcgtgatgctagccgcagatccaggggaaatgaccaaactccactccttgtctcctcgtggctgctcgcaaatctccactccaggcattctcgtatctaattgacacagcagcgaatgccccttccagccatcgagcttgaaaaccaacagccattttgcataggatacaatctcaaccacttgccaccactcctcactagtcttcgagtcgttctcaggtgctagccagaaaacgccaggaagctggtcatcgtaaaaggatacaaactcccttggtggcgtgctatcttctccaagctgtgcagtgatctcctcaggaactgggatgtcgtcaatcgttcgtcctaggcgaagtgcatcgctccgtgatccgttcatctccagaaatcctcctatggcatcggcccatcgttgactcgttgcagcgtcattccaagcaagcagcagtgttgtatcttgcctaatcaatgccaacgcgcgcgcttccccagttgattcaagcactggaacactggctggaacaaactcaagaaacgcggaatcctgcttcaggtgaaggcaatgcttgatcgtgaaagatgccccggactcagtctcttgcagtttgctgcagacaagtgttccatcctcgaagcaatgcgcgtatatcctttcgggttgactggctgcctctccatccactccgctaccattttgcgcactccagaccgacaaaaatactcctccatgcagaagcagcttcttgctggacaaatctctcagttcatcagctccgtcaccgtggaaacaggtctgcaacgcaattaactcgctctcttctcgtgcgtcggccttggcaatgtgaatgtagtgcttgttctcctgggcaatgtgcatcagctgaggagcgtagttcagcttctcttcgcagcctgactcgctgttgttgctcatgatctcatcgctgtcatcttcggacaaggccttgctcagcgcttcgacaaattccacgagttcgtcgaatcgcttcaacggacgagctaccagtttctcggcggtcagttgctgcttcgccaggaaattctccaccacagttccgtctgaatctttgtcttgtcttgtcaatgctttctctatcactgcttgggtagagtcgcctctacaaaatagcctcccgtagaggatgcggaggacgctgagcatgtctgccagagtctctacgaagcggctgcatttgtcgtcggccggactgacatctccacgagctcgaggctccgcgaatggcttcaacttggagtggaatagcacgtggaggtactggagctgcgctgcagtctcaacgaaccggtcgaagtcgctatccacgagtgatccgtcccgcgaccgagcctcaaaccgaagcttccgcgccagctcctgctcgatattcgctagaaactgaacatatgcgctttcctcctccaagaacacgcggagacccgcctgcacagcttcccactgctctctcattcggacggatttggccgcgcgaagagtgctctggttcaggaaaatggcgccaagaggaggcaaagtgtcttggcgtgtaccaatattatggtacccaaaagtgactttcactttaacggttaattatctattgtaggcgaacgacgcgctacctgcacaaaacagtcgttgagaaaactgacgggtgtaagaaaacagaggtaataagagtttaactgaacagtaaaacagaagcaatgagagtttagctgaacagtaacaccggggatgtactacggctaggttttattatatacattctgacacaacttcataccgggtctgattaaagcagtaaatgtaggatggagcatcaccgaatgcataatggaagggccaaagtcgaacaaccatattctcgcaacaacttactctttagaatgttaagagcgtctctatttacattgagctagctcacaacaacttactctttagaatgttaaccctttctgcactgctacttgaagcttctcgaggagtaagtgcatttgtacaacggacgtctcggaagaatccgcctcgatgactacattctgcctctgcgtgctgattacaagccaatgcacaccaagccttacgcgccacggggccaagagggtgccgcgtatgatgagatccagcgcttgctcgaactcggcgtgattgagcaaatctatgtttcagaggccgctgcaccagccttcttcctgacgaagccgagcggagctctccgtctgctagtggacttccgtgcgctgaaccagtattttcgtcgctcaccatactacatcccgaagatccgtgaaatattgatacgattgggcaaggccaagtgcatgaacacactggacgcgaatattcgatcttcgttgttgtgtatctggacggtactctcatcttttcggataaccccgtggatcatttggaacacctgcgcattgttttcgagcgcctgcgccaatacgacgtcaccctgaacgccaaggaatgccacattctccgagagcaggttgactatctcggattcagctgacaccagaaggcatccaaccccaggccaagaaagttgaggcgatactgcggatcgctgagccgcgaaacataaaggagctgcatcgcttccttaggatgatcgcttattatcgcgaaatggtcccctttgacaagccacctcaacctcgaagaacgtccctttggcttggacacccgaagattctgccgattttcaagctgtgaaagctgctctggagcacaatgtgtggctcgcgtttcctgactatcatcgcaggtttcacgtatttgcagatgcgagcgggcgccaaataggaggcgtcattatactgggcaagcgcactttggcgtgcttctcgggggccatgacggagacccagcggaagtacaccacaatcgagtgggagcttctttccgtcgttgaaatcctcaaagagtaccgtactatgctactggggtttcctattgtgcttcatacggatcacaaaaatctgctgtacccgcgcgaatactcccttcgcgtcaagcgcgggaagttgctcctcgaagaatatcgtctgactgtggagtacgtgccaggagctcaaaacgttcgcgatgagatgacgctttttcccgtctccagtatgatcacgtcaagcaggtgaccgaagccgagatgtacgccatcgaagatgaagaactacccatcgacggcgctgtaatgaagaaacaccagctcgaggaccccacgtgcaagtcgattatcgagcgtctggagcggaacagtgcagatcgaaattacgggcttcgccctgcgctcggaacggtcttacttcaatattaaaagcgcataatggttcctgagtccctgcgacaggagttgattgagctctaccacgacaatttgctgcacacgggcggtgaaaaaccattccgcaccatgtcaacgttttggtggcccaacatggagaaagatgtgaacgcactcgtcaagaagtgcattgcctgcaaacgggctaagctccacggcggcaagcaaaaatacggtcgactcccgccaacccctgccaccaacaacgacaggccattcgatgttgtgcatgtcgacttgatcgggctattgacacgaggcggtcccagaaaattgccgacgttgtgccgtcacctctgtgacttggagtttgtatcggatgctgattggtggatgacttggatacggcgcggctgtacccgtgtgacatggatggcgacagtgggagagaagtgatttctcgggatgaatccagcgcctgaccgcatatgggcccaactggctggaagtgtgaatcctgggagtgcacgcccaggatttcagagaacactcagtccagccgcggactttcccttacgatgagtgcctaaagtctggcggaaagtacacctcatcttgctgtggctcagagtgccccagagaatcaaattaccctgagaatcaacccactaccaccatgatcatgcgcaggaggccgctaaacccgctaaaagtgtggctttgtggagatacacgcgggcctgcaatgtagcagacttgttacccagagtgctgcacggaaacccagagtgccgcacgatgacccagagttcacctccctgagtacaggtgacccagagttccaaagatgattctctgggtttggaccataaatccagactctctatactgaacttaagtgtttcccgagccaacacccaagaatccccacagttccccaagattcctcagaattcccaggatttcagaagatgaccctgagtgtcacctggttttcagggattcgagtcagttcgaagccagtctgcaatcaaaatgatgcgtgaccttgaggaaccgttgtggatgcaaagactggatactttcgaggagtcgagagggagtcctgcaccatactaaaccaagtctaaggacccactattagcactttcggcgccgtgcgacaatggattcgcaagccgatcgcaagtttggaccgctgatcccaaggtatactcaagacaagacattttgacccaaaacatagtgaacagaagatatttgcccgaagaagagagagagagagagagagagagagagagagagagagtgagagagagagagaagtagctgataaaaaccaaacagagttcctgttaccctgtactgcgcaagtgacttcggccaagcctgccgacggaaatccggaggacccgagactacgaccgcgggacgctaagggcacatcaacggcgaaggacagccgtctgtgtggactccatcaactaaagtccagctaggtggggaccagcgacggccttgagcttcctggagtgatccatctattccatatcctagttggggcacaggcaccgcgaagacgaacgcagaggccgggcctactgctagaaacgagctgaacgagttcagctcggacacaatcaacttcgtgcagcgcagacaagccgtcattcggtttgtccaagacgctatcgcagcttctgtcgaccgacagaagctgaacgcagacaatgttggtaggggcaacactaatgaattcaagaagggctcattggttttgttagcaactcaaaacctgcctaaacatgcagtttccgacttcggggcgagcaagctcgctccgcgcttcatcgggccgttcacggtgttgacacggcatggcaacgcctacacgctagatattccatctagcatgcgcctccatccgaccttttacgtcgggcggctgaagccataccagcagcacgagccacctagctcggctggcccgaagcggaagccccagcgggagcgaacctctgctccagcgcgtgaacgcgctgggccaagcgtgcgacgcgacctcccacgtcgacagagatgtccgacgcggtctgcgaggcctgagcaacttgagctctcagggtcgccatctcctgcttcagagcggcgaactcacggctctgaagctgctccacagcagcgacccgctcctcgagcgtcgggccaaggtcaaccccaggttgaccatacccggggcgtgttcccaccaccgccgcctccgatccgcgacgcccgcggctcaacacgctggattgttgagcgtattgtgaaccatagtatcccgaaaacgaaccggcagccggttcgttatcgtattcgttggagagggtttccgccccaccaagatacatgggagccacgggacgtcctgctgcaggacgttccggaaatggtgagggagtacgaagctcacaacgcactgccgacgcgaaggtagtgcgagcgctgtggtcacttacagcgcccgaggccccacgatcgtcgcgttcctcacgtgccaagaacttggcacggagatccttgagactctcaggtacacgaatcgtcgtgtacccgtttaggtcgcggtcactcaagcgcaccgcacccggaagccacaacgtgcactattggccttcgggcacagcgcatggaataccagcgtccacagaagatctgtggagctgctccaacctcccgcgcgtcgagaatgtctcgaagcattcacgggcgtgcttaacccgctcacggtaagcagccggcttcttgttgaagttctcaacaaaagcattccaactttgacaaagtgcctgccactcaggcactttgctgcgagaagaggtcttcttgctggagaagtatcggagctcgtgaaagagtccgatatagtaatcgcgcctttgattcgttaacggatcaaagtgctgctcctccgccacagcgtcatcgtggatcccgctgtatacgtacagcgggatttcgtttggaggcacagtgttgcccacacggtctgcgatctctgacgcagacggcatccacggatcgcgcgctgctcaggcagcgcgcggagaacttgaagacacctcacgcggggagcttaaagccccagcagcagagagcggagtgtcgctctcgccgcgcgaacgcttcgagctcgaagcgtccgagtcgtctccttcacgagggcgtctcgacccggcatgcgggtcgagactatcactgtcgatagactgcttgcgcttgctagaagaggcctcgccctcttccatctccacgtcgtcgtcttcgtagtcaacggcgtcgttgactacagaggaaccttcgaggacaatctccgactgggttgtccccgacgcggcctttgtagcgagagcatcgcgctttgcctgctggcgctcatggtactgagcaacagagaggttaccctctgttgcggcggcggtcttcttctgcggcaagctcattgcggaatgagctcgagttttctttctcctaacgtaaagaattgacgaatggtcaatttcctgattgacgtgccgtgactcggcgcgtctaaccttgagggggggatggtgtaacagggttacacgcacaagtggctacagtcacttgtaactctaacagacacgacgtcggttagaggttcgaaagactttctcgaccttggtgtagacacaccaaaggctacatacatttacgaccaccacgacgggtggtccatagagacttaggattcctattggctgagagcagcatctcttagccaatgagcgacatgcatagcattggaattctgccaaccagccgttggcagattcctatcttagaatattacatttagaggaagtcagaaacataaaacaaaactagcagttctcattttaacccaaaaacattatttggatcgtttatttagattaatctatactcggaggcccgagtataattaaccctaatttaaactaagctacgcttcctcacatacacgcgcacacgtgtaagctaaagtagtgagccaaagtaggcccattacacctagtagcacttcgtagtccatccaacgaccgactacctgagttcgtacgtcaccgcacgaacgcggagctgagaaccttcccatggatacggaggtgtccatggaaagctccactacgcctgcaactcacgttgcacgcgctgactgtccccatctgtcggacccagagtggtaagctctccaacgactgtcaacagtcattggtgaggcggctgtagctacgatgctgcgtacgctaacgccgacggagcaacatggtgttgctctgggattcatcatgagggagcagcgagatgctgcttcgtctaccacggtgtcgtcggggacgacaccgcgcgcgcaatcgctgaagctcagcgtgagcaattacgttggaagagagggcgagcctctcctcagttggcttgtcgaactcgacactgccattgcggctcgacgcatcgtcgacccgttgtcgaaggtcgcgttcgccatgtcatgtcttggcggacgtgcaagaagttgggcgtatggacgccgactctctgatcctacgtgcttcagtacgtttgagggtttcaaggaggaactcagacaagcgtttgagcccccgcaaaatgagtttcgtcgagggcagagttcctcgacctacagcagggtaagcatgatgtccatgcttacgcgcagagagcacggtatttggtctcgaacattgtgaccaacccgatagacgaggcgaccaaggtcgtcacgttcataaagggtctgagagatgggcctgtaaagacctatctcttcagtgagtacccgagtactctcgaagctgcaattactcttgcgatgcaggaggagtttagactgaggcaggctaaactacaggcgaatgcgccgaggctgcaaccgcctccggtcgcgatagcgggaggtccggaaccaatggacctctcgaatgcaacggctgttggttatcaacagcaacaaggaagtaatgtacgatgcttccgttgcggaaggatcggtcactatgcccgagagtgcacggcacccgtgcaccgagatggtggtcgacgcggcgatgccgggcatcgtcgcggacaaacaaaaaacgctggaacccagtaggcgcggggcgccctactggtaatgcagttccgcgtgtcgaccttggacacgcgacactgaggactgcagcccccagtgaggttcatcctcactgcaagaaccaagatgacaagcctgaccttgtcatcctgaatgtgaactcgatgagagcaagcggctctctccgtgctttggtagattctggcgcgtcgaacaactttgttcgactgcgaagtctatcaaggcttgacttcgaggaggtaaagatacctcgaagtatgttggaggtacgactggcaacgggtgccgtcgtgaagaccgagaagcgcatggtacgcgtgcgcttcacgtatgaagatcaagagtttgtcgagacctttatcgtcctggatctggacgataagtttgacattgtattgggcatgccgtggcttgcacggcatgatccggtcatcgattgggagaagcgcactctcgtgcgcttcggtcgcgatagcggaacagagagcgatggacctgttgccgcaacgcacgcaccgacaggtgcgcgcgactctccagtcaggacagcgcctaatgccgctgtccaggagcgccctgggcgcgcgcgagcacacgcgcaagagcagcaagcgtcggcgtcgccgccgacggctgaaggagaaaatatgttgatctcggagatcgacacccgcttttcagcgaatcaggaagagtctccggcctcaaggggcacggatgacgcaggcaagtcacacgcctcagccgtggaggctgacgcgaatctgattggatcaggtctggccaatattaagagccaaagtgacgaaacgccgtcgactccgggagtcgatggattgggtgaatttgattcgtcggctcggggagccgacgcaccctccgtaatgggggtctctgccaatggttggcgtcgaggtgaagatggcgtgtcggctccgggagccgacgctgcaggcggtgcggacggttgcaaacgttccgcaccggaaaaacttgcatgctatcgtgcagccgggccgcacgacgaagcgccgggcgaccaagccgggcttgaagtcgctcgcccgcgggatgaacccgccggcggtactgaagatcacccgtccacggctgggcctggacgaggtcaagaaccaagcggagccgggctccgcagaacaagaagacggcgcatgcaaaggttgctgtgcaagtctcgtcctggggccgagacgctacaagaaatgtctgccgggcagacggaggcagagaagccgggcgtcgagacgttgaacgtcttgacgcgtacctgtgccgggttccggtacagggagatgactctcgctaaccctccgacacaaggatcggagttgacttcgcttccagtcatgagctggaagcacttcgcgcgtgacttgcacgatggacgcatcgagcaaatatgcattctctcggacgccgagagaacgaagagcgagaatgaagaactgaggcagttcttcatggagaccaccactgagagtgaggacactctcagtgcgaagactaagaaggagcgctttgaggagcagagctgggactcgctgaagtcgagtcccttctacgagattctacggaagcacgcggacgtgcttccggaagagacccctgcggagcttccgcaggacaagggcatccagcacgagattgatctcgtgccggggacgaagtactgtgtcacgcggcagtggccactgccgcgagagcaggtcaaagcgatcgacgacttcttcgaaagtcgtcgcaaagctggacaagtgcgggaatcgaagtccccgcacagtgctccgacgttctgtgtcaagaagccacagggcggttggcgcatcgttcatgcgtacaacaagctgaacgatgcgacgataccggcgcagacgccgatacctcgacaagatgttatcatcgattcgatggccaggagcactatctacagtgctcttgatctgcgcgatgggttctatcagatcctcatgcgtgagagcgatatccctctcacggcagtgagcacgccgagcggcatgctctgggagtggctagtgatgccgcagggtctgaagaacgcccctgcgaccttcaacaggtgcgtgacgcacttgttgcgctcggtgcgcgacttcgcaccgagctacttcgacgatgtgttcgtccacagccgggctgcggacgggatgagcgatgttgagatgcacaaggtgcatctccggaagctgcttgcgctcatgcgcaagcacaagctctatgcgaacctgaagaagtgcatcttcggggcgagcgagatacccgtggtcgggtgtctcgttgggaagaacggtgtccgccctgaccctgagaaggtcagagtgatcaatgagtggccgacgccgtcgaacgtcaaggaactgcggcagttccttggcttgaccacgtacttgtgcaagtacgtgaaagactacgcgggcatgatacgcccgctgtcacagctcctgaagaaggacgtcgagtggatttggactgctgagtgtcagcaggccttcgatgcagtcaagcagggcttgactgaggcgccgatcatggcggtggccgaccaagatcgcccattccacgttgtgtgtgacgcatccgacttcgcaatcggatatgcgttgatgcagcacgatcacgagggtcgtgatcgtgtcgtctactaccaatcgcgtcagctgaagccagctgagcgcaactacccggtacatgacaaggagctccttgccatgaagtacgcactcgcgaagttccgagtgtatctactcggaagcaaaccgttcgtggtctatacggaccacgcgtcgttgcggacggctgtgaagtcgccgcacatctcgcaacggatggcgagatggctctcattcttcgcagagtataacttccgggttgagtacaaacccggaagactcaatgtggtggccgacgcgctctcgcgtcgacctgactacgccacgactgatgccgacgtcaatgccattgacgccatgcgatcgagcaccccaatgtcgtcactgttggacgacgtgaaggtcgcgtacgcgcacgacgcggacgcgaagctcttgctggcctacggctcagcgccttctgaccaagcatcttcgtgcttgtgcacaccgttaccgggtgcacgacgggttattactctacagtgcagtcgacgacaacgcggaccgtgttgtcgtgcccaatgaccatgacctgcgactcaggatcatgtatgagtatcacgatgcaccgactgcggggcatccgggccgtgagaagacataccttcttctcacgcgagacttctactgggcccaccagtataaatgggtgcgcaattacgtccgtgcttgcgaggtttgtcaacgtgtgaagcctgcgcctttcgcgcaggctcccttgcagtcactaccaactccacgggagtgttggcagtccatgtctttggacttcgtgttcggtcttcccccggacagccataggaacacgggcgttgtggtctttgttgaccgcttcagcaagatggtacatcttgctgcagtacccgctgaagtgactgcgaaacagacggcgcgtctgttcgttgacatggtgttcaaacaccatggcataccgatcgacattgtgtcggatcgagacccgcgcttcactgcacacctttggcaagaagtgtttacacttcttgggaggcaactttcgatgtcgactgcggaccatccgcagacggacgggcagaccgagcgcgtgaaccgcgtgctcgtagacgtgcttaagagctacgctcactcgttccaacactggagcgagtgcctgccgatggcggagttcgccatcaacaactcggtgcatgcctcgaccgggcatacaccgttctacgtgaatgccatcaggcacccacgcctcccgagtctactcgggatggtggctccttccttaagtgggggaggatctacgactccaacacagcagccgcagaatgccgctaacgcttgtacagtgtcagccgcaacgacacgaagcaaagccgagaaccgcgcgtttgtgcagggcacagacgccgacaagagcaaaaagaagaagaagaacgggtctgtgcagggcacaggcaccgcgaagacgaacgcagaggccgggcctactgctagaaacgagctgaacgagttcagctcggacacaatcaacttcgtgcagcgcagacaagccgtcattcggtttgtccaagacgctatcgcagcttctgtcgaccgacagaagctgaacgcagacaatgttggtaggggcaacactaatgaattcaagaagggctcattggttttgttagcaactcaaaacctgcctaaacatgcagtttccgacttcggggcgagcaagctcgctccgcgcttcatcgggccgttcacggtgttgacacggcatggcaacgcctacacgctagatattccatctagcatgcgcctccatccgaccttttacgtcgggcggctgaagccataccagcagcacgagccacctagctcggctggcccgaagcggaagccccagcgggagcgaacctctgctccagcgcgtgaacgcgctgggccaagcgtgcgacgcgacctcccacgtcgacagagatgtccgacgcggtctgcgaggcctgagcaacttgagctctcagggtcgccatctcctgcttcagagcggcgaactcacggctctgaagctgctccacagcagcgacccgctcctcgagcgtcgggccaaggtcaaccccaggttgaccatacccggggcgtgttcccaccaccgccgcctccgatccgcgacgcccgcggctcaacacgctggattgttgagcgtattgtgaaccatagtatcccgaaaacgaaccggcagccggttcgttatcgtattcgttggagagggtttccgccccaccaagatacatgggagccacgggacgtcctgctgcaggacgttccggaaatggtgagggagtacgaagctcacaacgcactgccgacgcgaaggtagtgcgagcgctgtggtcacttacagcgcccgaggccccacgatcgtcgcgttcctcacgtgccaagaacttggcacggagatccttgagactctcaggtacacgaatcgtcgtgtacccgtttaggtcgcggtcactcaagcgcaccgcacccggaagccacaacgtgcactattggccttcgggcacagcgcatggaataccagcgtccacagaagatctgtggagctgctccaacctcccgcgcgtcgagaatgtctcgaagcattcacgggcgtgcttaacccgctcacggtaagcagccggcttcttgttgaagttctcaacaaaagcattccaactttgacaaagtgcctgccactcaggcactttgctgcgagaagaggtcttcttgctggagaagtatcggagctcgtgaaagagtccgatatagtaatcgcgcctttgattcgttaacggatcaaagtgctgctcctccgccacagcgtcatcgtggatcccgctgtatacgtacagcgggatttcgtttggaggcacagtgttgcccacacggtctgcgatctctgacgcagacggcatccacggatcgcgcgctgctcaggcagcgcgcggagaacttgaagacacctcacgcggggagcttaaagccccagcagcagagagcggagtgtcgctctcgccgcgcgaacgcttcgagctcgaagcgtccgagtcgtctccttcacgagggcgtctcgacccggcatgcgggtcgagactatcactgtcgatagactgcttgcgcttgctagaagaggcctcgccctcttccatctccacgtcgtcgtcttcgtagtcaacggcgtcgttgactacagaggaaccttcgaggacaatctccgactgggttgtccccgacgcggcctttgtagcgagagcatcgcgctttgcctgctggcgctcatggtactgagcaacagagaggttaccctctgttgcggcggcggtcttcttctgcggcaagctcattgcggaatgagctcgagttttctttctcctaacgtaaagaattgacgaatggtcaatttcctgattgacgtgccgtgactcggcgcgtctaaccttgagggggggatggtgtaacagggttacacgcacaagtggctacagtcacttgtaactctaacagacacgacgtcggttagaggttcgaaagactttctcgaccttggtgtagacacaccaaaggctacatacatttacgaccaccacgacgggtggtccatagagacttaggattcctattggctgagagcagcatctcttagccaatgagcgacatgcatagcattggaattctgccaaccagccgttggcagattcctatcttagaatattacatttagaggaagtcagaaacataaaacaaaactagcagttctcattttaacccaaaaacattatttggatcgtttatttagattaatctatactcggaggcccgagtataattaaccctaatttaaactaagctacgcttcctcacatacacgcgcacacgtgtaagctaaactagtgaaccaaagtaggcccattacagacttggtctcatcttcggacgagtctgttgtggaagtaaagccggagcccgtgcgagcgaaggagaaggcgaagactcagagttccaaggtgaattctgggttcgcaccacctgaacccagcgtttcagcgctaagttcgcaagcgtcacccaggaagacgcctcaaagcgacatccgggaagctgatgcgcctgctcaggaaccgagagcagcggcgttggacactgagaacatggtgctgtacgtccgacgtgaagttcgacgctgggaagaggtgaatcctgggaaggtgacgcccccgagtgtcgtctatgagtggccgactccgaaaccggacgccaactcgtactttgctgccgcgtacgcaacaggagactacttcaagtggcgtttgtctctgacgaaccaggatgaagcctggatctctgagtttcacctcgcccggtggggtcgcggaactgcccaggatctcatggcgactacgattccccagaatatcatgaccgcacgcgagtgcgtcgccattctgcagactctgttcttcgaagctggattcgagtttgtcaacttgatccctggctggtcttcggcgcgtgcttccaggattccagaaagtctggtgcgctctgtcatggaggaaacccagaatttcatcgccgtggaactggtcgaatggagactggtgatcgctggtgtgcctttcaaggtgaactctgaagaccaacatgcaccaagcattcaagatcaagcgccaagactggactaccacaaggaagatggagacggtgatctattgatgacggactacgatgcggatctacggggccgacagtttgtcctgacattcagggtcacgggactcaggatttcacggatcccacgagggtcgagtgatggtgagccgcgatccaagcgcacacagcatggaccgcctcgcccgcaagtcccgtcgacgccatcagcgttgtccacaccgtcgctgtcttctcttccagagtacaagtcctcggctggcgcttcgctccagaattccactcccctgaattccatagccaatggacgtgattctctggaggcggaagccaaggacgctaccccaggcgcggtgccaagtgtcatcggtacctcgtgcgcttcggatgagagtactgcctcgggcgttcaaacgtcttatggtagcgcttcatcttcgtcgatgatgtcgcttggacaacgagttggagctctagcgcttgtggcccagagtgccggtggcttcgcagctgccggtgatcttggatttcaggtcacccggacagtcatcccgtcgcgtcttgtgtcagtcgaccaagatgacgttgagatggcatcgtcggtgcactctgacccagagatcgcacccaggaagaccggtctccccaggatttcagcgacggctgccgagccgaaactcagggtttctgccccgatttctggatttggtggtccgagggatgtcagcgccgatgagcggagtcaacaccagagctctaagagcgaggtccgctctcgacgctcgacgaaatccagaaaatcagctgcgtcgagtcgttcgagtggatccaagaatcttgggtcagcttcgtccgtgtccgcgaggtctgggcccgcccaaatcgagctgaatgtcttgcgacaacagcaggagtggcaggcccgcatggagcaggagcaacgcgagtttctcgccagagaacgcctgatgccttggagcgcgagcgtctcagggagcaacgtgacctggacgcgcgccgccagatccaggaactcacggatcgcttggtcctcgctgagatcgcccgaggagaagcggaacggcgtgcgcaggacgtggaaactcgccagacccagcgttccactgaaactcaggggatgacccagagtatcacggaagctgtacgtctcgagcgtgaacgcctggacgccgcctacgccgagcgctggcaacagcgcgaagccgaagccgactcggagcgcgcgcgctgggtttccgagacctatgcgggttagaaggaacaaatgtcaactatggagcagaaggtccaagaacttgaggcggaaagagtgcgagagcgggagtcttccgagaatatccagcgcttccacgctggccaagtgcgcgaccttcgtgcaacgttggcccaagttcaagcgcgtcgcgcaaccgtcgcccctggtttggcaacaaatgtgaggtcgtcagtggctcagaaccctgaagttgcaacccgaccccaaaaatccagtggcgtaatcaacggaaacgcaagtgtcacaggccagagacgggagacagctgaaccgaagaacacttccgaagtcgccgcctcccagctaagagcgaccctcgcgcagacttccgccgacacttccggcagaatcgcgcgcgtcaagcggggacatggcgctacggagaccaaggtgacccaggatgtcaaactcgagcctgcgtctctggagaagacgtcggatcccaggagaacagcgacctctaaggcctcgcaggactctaaaacagactccaagcgctctgcacccaagaaacaccagcagcagaagaagaagcgtcaggatgtcaatccaccctcggactcagacccaagctccgattaagcgccgattccagcgatgacgactcgtcctctgagagtttgggtggcagttcggacgggaaccctggggttaacctgacgacggcctctacggctcaagctggcactacgctcctgacgttcagaccgtacatcaactcgaatactctgggtgagttcgatactaaggcgtcactcagggaacgcgtgcattggtgggagcgttttgcgaacatggcggctcagggaggttggtctacgaagatgcgaattcaggaactcaagctgaaactctcgggagctgcgcgtgactggttcaaccagttgcccaaacacactcagcgtgactggaaggagttggcgtctgcattcaagaagaagtactgcaaagcgcgctcgtcgtactctgaacgctacttcacgatggagatgaagaactcagagagcgccctggatttcttctatcgtctgaattccgccgctgggaaggctgacattgactttcgcaagtctttgaagcgtctggagaagtatatccggaggttcatcacgaaactcagggacacgcgcctcaagacgtcgttgcagggccagagattcaggagtatcgctgatctagagtacggtctggaacaggacgaagaggtctggagtcgcagcaaccatgatgctccgccacccagagttcgtgactttcgtgccgacaacattgctcaggggcgtttcaagccgaagcgtgcaggacgtgcgtacgtgactaggggcgatgtctctgactctgagtcggatgaagaccctgaaattcacgcgcgtttccaggaaatcacggacgaacccagagtttcagtccgaagtgcgagcgcaaattcagggtcaactcgtgagatctctggagaagaaacttctacgtctagcgctgggagcctggcgagtatgaagggtgccgagtggactcagacgctgacgaacgaggtctatcgcgtgatggataacatgggatggcgtccaccgaacgcccaaccaggaccgaacgcgaactctggattccgttcccctcgccgcgaaaacccgaattgggacaagttctgcaagaagcgcagcaagtgggggcacccagaggaaaactgctggaaagacgtgaagtgtgatcgctgcctggaagtaggtcatccgactcacttgtgtcgcgcgcaaccgtgcgagaactgtggcaacctgcatctcgggaaaccgtgtgaagactggaagccactggaagctgtgaagaaactctcccgccaaggtgcactgaaggatatgccgagtcaaatcctggataaactcctggatggcgaagcaaactctgagaggccgtcaaactaataagcccgctgggtggggacccagtacgcgccgggctgaagaaggcctcagagttatgtgttctagtgtatgttggccctgagaacatgaacccaagataaccaacaatgcatgactactttgactcaggatttcatgacttcccctgaaaatcagcatcctgaacaagcgaactctaggtcggtgaactctgaagaaattgtggagtacaagcggacgagagttctcctggataccggtgcgactgtgaatattgtgagcttcgacttagcgcgtaagctcggactcacactcaagtcgcacaagcaaaccaaggtgtctggcagagggtcttcagggggcacctcttcagtctgagttgcagcgtcttcagcgaagcgcacgcgacgagtcttcggtttcctgagaatcgaggcaagcagtgccatgtcggggccctctgcaggtcgcggcagaatcttcgtaggccactgatactctggggtctcgacacaggatggctccagcgtagccaggcgttccgcacgaagtctgccctcacgcgactgaacactctccagaataagagtctgtcactcccggtacgcaaaagaaccagggcgccaaagcgtccggcacgtgggaagaagccatactccacgattcgggcgaccggcgttctgttgtgaatccagacgtccttgtccgagatgttgaccaccttcacagcgaccggccaggatctcgcagcgtaaatcaggtgcgttacccagcggtcacctcgtcctgcccacacatcttcacgctgcgggttcgtcggtccatacgaaatcttcaccaccttggtttccccaggggccaggtaccaactacctgtggtttccatgggcatgtcgacacccaggcgatcctctggagtccatccacacatcatgatcgccttttcatccggaagtgtcgcgagaccttcgcgaacactgatcctcactccagctgcaaacatgaaactcatacccagaagtacttcgatcccttcgccgatgttagcaatccaaacatccaggagatatatcaccctcgaaccgagagtaatcttcagctgagcactggcaccgatgtacgtcggaacgcctcccatgaattccgagacgttgctgttgatacgagtgacttgggtggcgttctgaaggatgcggggaccgatattgcctcgcagactgtcggaaccccagagtacacgagtcctgaaggtgatacggctgctgaaaacctgagtttacaggttgaagttggcagtgattctcagggtcagtggtgcgagaaaggtgattctctggatgacgacgattcttagggtgctgttgaagattactgggacatcccgatctcagggatgccgggaactccgttggagaagctgaagcaggaatatgagcgctacatgcggctctcgacagaggacctcgactacgagcctgcggtctacatacgcgaaggaagtgagttactctctcagttgcgcgaacagttggttatgcttcctgagatgcgtgacttgacccctgagtgcaagatcgaggaggcaggtgtgggagtccctgggaaaacgacgcccgagattgaagaccaagtgaggcgaattctggaatatcatcggaagatcttcttgggagacggcaatgcagctcccccacctgcccgtggagtggtttgtgacctggatgtaggcgaggctaaacctgttgcacagcggccaaggtccattgcaccacacctgtggaccaaggtgtatgaacttctgaagaagcttctggagaacgggctgatcgagacttctacgtccccctgggcatctccgatcgtgatcgtcctcaagaagaatggcgttgacatccggatgtgcatcgactaccgcgtggtgaatggcttcatcaagctctcgcactacccgctaccgcttattgatgatcttttgattggctttgagtcagcgatgtggtttatgagcttggacatggcgagtggtttctgggctatcaagatgaccgagagagccaagttgatctctgcgttcgtttgtccctatgggcattaccagtgggtcaggatgccgtttggcctcaagaacgcccagctgatctaccaggcagttctcaataactgtctatggggatttctgcggctttcccctgaggaagaagctgaggttgaccaggatgtcttggactttttggggttgaactctggggaacccagagtttcaggttaaaatgccctgcgactttcagtgttgacggatgagatgactgtttcccagcgtaacatcccggctccctctcagatgggccctgtcctgggtcgaagctcgtatatcgacgatatcgcccacggtgcgcctacttgggagcagctgtgccaggatctgaacgcgctgctcttccgactacgttaccggaatatctctgtgagtcttcccaagagcgaattcgggaagttgtctattccgtatctctctcacgagattagtgctgagggtatccgagcgacccctaaaatcgcgaagggggttcaagacttgccgttcccgacgacactgaatggtgtccagagtttcatggggagtctaaattactacaacaagttcattgaagacctacccgtgatcgcggccgtcctgtacgagctgactgaggaacaagtgaaattcaggagagacctgtcgagagcccaggaagcctttgaaatcctgaagcgcaagattgtttcgactccgttgctcagacatccggatcgttcaaggcccttcgtgattattccccacgcgaacccgtgggcagcatccgctgtgttggaccaggagtacgacgggattgtgcatccggttcggttcacaggtcgcgtcctgaatgacgctgagctgcggtatcacattgcggagaaggaggtgattgctatcctgagagtcctggaggtgtttcgcactctggttgaaggcagccctgagatcgttgtctacacgcgatactctgtgttgaagtggttgctgacttcgcagtcggcagacggtcgaacggtgtagtggggtctgaagttgtcccactggaacctggagatacgcagagttcaacgagatgaagacggcttggctgcaattctgggtgcgggtattacccccagagaacacttggatgagatcgctgaaaacctgatcccagccaagggcgcgtcaaacctccagtgcctatcagcatggaaatgctggaagcggattatgaggggtgtattctgagtttcgatggcgccgctaagacttccacgcgacaagggagctgtggttgcattctgtggcacgtccccggttgggaaatcctggatgcccagggattcatcctggaggacgtgactgtgaacgacgctgagtattatggacttctgaagggcctcattctggcgattgagcgtgggattcaggatatcgttgtagttggggactccaggattgccatccagcaagcccagggtctcatcaactgcaatcagccaaatctccagaggaagctggccgagtatgaagtgctgaagttcaagtctgtgcggctggtgcacgtcaagcgagagtttaaccaggccgcagactacctgacgtctaagaccctcgcgcttggtgaatcctggaaggtggaggatgctgacgaacgaacacatctgcagttggtgtccaagattcacgagaagttggtaaaactgaaggtgttattgaacgttggaattcaggggagtgattctcagggtgtcgaaactctgggtatccctggacctgagtgcgctccgttgcctgtggcggccaaagtgtttgcagtaatgactcgggcgcgaactcaggagatcgaagcccaaagcgaacccatgggacctctggagtaccaggcagaacgctggcgacgcatcaaagtgcaccagggcaaagatgatcacctgctgcaactcaaggatttcctgaaaggagaagacacgacgaagctgtcgcacgctcaagccaggaaactcgcgaaggtcgctgatgatttcgtgttggattccagagaagtcctgtaccgcttgagtcgggctaccagagatcgaccccgagacatggttgacgaactcagactcgtggtgccaaaagatctgcgaccggatatcctgtattacgctcacgaagattttcagggtgggcaccaggggatcacgaggacgtacgagaagctgcgctctgagttctactggcacggcatgtacgctgatgtggaagttttcgtcaaagagtgtgtggattgcgccagcggcaaggggcgccctcagaatccagggccttcccctgggaacatcgaaccgaggcgcccttttgaagttgtgtctatggatttcgtgacacacttgcctaagtcggaccgtgggaacgcgttcctgctgctttttcaggatgcgttctcaggattcgtcatgtgtaacccatgagttccaccacggcgcaagatgtcgctgaagtgtacgaagagcaggtcttcaggagattcggcgcgagctcgatgctgaggcacgaccaaaacccaaggttcatgagcgaggtgttcacgcgcttccgtgaacttctgggtagcaagcagcgggccactctggcgtatcgccccaggcgaacggacaacaagagcggtcggtgcagaccgtcgtgcgcagcattcgagcgtacattgcggaggcggaccagagcgactgggacgaccatgctgagcgcctgatgttcgccctgaatacatcgttcgatgctactcgcctggacactccgtttttcttggtgcacggctgggacgcacacggcactgtgtctgcaatgttaggacccaggccctcgagtatccaggagcgcactgcgtacgagtggcgcagaaagctacagcgtgactatagttatgcacaagcttgcgctgaggatcttcagaagaaggccaagcgcgcgcgctctgccaaacaaaccaggaagtggagagagctgtccgaacgactgaaggcaggattcgcagccggtgatgctgtgtggctgtatatacccaaagtgcagcccgggctgagccgcaaactggctcacatgtggcatggccccttcagaattcaggaaatccatgaccacttccgcgtgaaactcagggtcgagaacacaggatatcgcgtagatccctgggtacacgtgagccgtttgaaacccagagcactattcccgaagcggcccactgtggagatcgacgtggacgaggatgatgactttgatgcggcgctgttgcctgaagacagttgggagcccgacgctgcgaacgatgagtacgaagttgagcgaatccttgatttgcgatggactaaacgggctcggacagcgagacgaattcgtgagtaccttgtgaagtggaaggggtatgatgagaccgagtggctgcctgtgtcgaagctcaactgtggtgcccggctctacgaattcaatcaaggcacaagagcgcgggcccgtttccaggccatgcaggctggagatgatcacccaggattctagcactctggggtgacaatgacccagagttacacgtgatattcaggggaaactctgggtgacactgtgaaactctggggaaaatcgacggaatgtggagacggaaaaagtgaatgtgatttgacttgatttgattatggaaaaggtgatacagctgaggctttggcagtgtgtgagaaggaagatgaaggcggcgagctttacaaggacatggagacagtaaacgaagttggatgacccagagaacaagtcagaaaaatgatgaatttctggggaagacattgaaatcgagatgaagtcctgggtattatggagagttacgctacgacatgtgaaattcagatggttctcgggatttggaggtgaccttgactctcacgagtgcttgagagacagcgggttgagcttgcggatggccaggggtttgatgtggcgcttgatgttgctcggcacgtattgtagccactcatcgtcgtcagccgccgtgttccattggactcgagcaggctcacgaatgtccaacgtcgctagctggacgtctaagtccttgcacttagctcccccgagttttttggccctgggatcctcccaaatccagtagcagcacttgtccgggaacttccagagacccggttcgtgcctcaacgacgggatgaacccaagagtgttgcgcgagcgctcgacgagcgtcttgtacgctctgcgtagcgcgtttcgacgcgacttccgctgagattccatggtggcgtctgcttgttcttcagtcggaataggcgcccagtgcccgcgctcccagattgcctgtgcgtgcttgtgcatgatgttcacgacgtcctccatcagcttgagcgctttcgcggagagtagctctcgctcatggaagtagaacatttggaagcgaccctgaagcatagtctcccagggttcagaatccaggacttcttggtatgcctcacggtcccagcgctcgtgagcaacgtcgtacgaatacttgtggatctcgtactctgggaacccgggagtctggcaagacgcactcttggtcgaacttggatattgaacaagaaccccatagatgcgccaggaggtctcgttgtcgtcagggtcttcggccgtcatcaactcacttgaattgagctccgagtacgatttccgcgcgagcgtcgacggatgcttggagcgtgatgtagccttggacccctgagtaccactagaaccctgagtggcagaagtgtctgtcttgtttcccgtgtcgacttcgagttggaaccctgaggtttcttgcttgactcaggacgggggcgcttagcaggaggcttgacttccaggggttcttctaccccattgtcgtcctctgcgtcgtcgtcgtcctctgcatcctcgatgtcctccagagtttcaggggcgacctcctcctcctcctcttcagagctattactagaggcgctctcctcaggttcctgggcgggaggctggtagtccgggtcgttctcgatgtcgtccaccgtggaatcggcgtcctcatcagggtacaccatggggtcatcgaggttcccccagggtggtggcacatcaccgcgtcgaaggcacctgcgaagacgctcgtctgccatttcgtagtaggcttcagggacgtacttgctccagggagtcaggtcaagacgacaccagtacatcatgctcacgagcatcttgatcagctgcggctgcctgaagtgcccgtgagccgcccggtcgctgccaatccactccatggctgtgtcgttcttgagcccagcaagaatggcctgacgtacgtctggccgaacttccttccagacgacaccccccgggagcatcgtgtgtgcggcctccttggacaccacagtcttctcgctggcgcgacgcacagagtcgcggcctggttggtgatccgtggggcgacgctgaactttgtgaggcttagggtgcgccgactgccgtggcgactcgcccggcgccttggaatcccgtgatttccggggtcttgacctttcttggaaccctgagatttcttggaatcctgagttttgcccccggtcttcgagccgctgcgaggcttgctgccaggatccgtgagatccagaatttcaggacgaccggacgatccagaccccgaaggcagaggcatacgtgtgtttttctctgggtacggggccaacgcagccttgcgcttgtccatggccgtgacgttgatgacagtgtcccaggattcgggaggcttcgagcccttgatgcagagcttgaagaggtcgtggaggtgctcccaattacccgtgaagtctgtgtgctcttgaaggaaatcggagaacttccaggggtccacggtggctgactcaagacgcgaattcaggattcgcacttgtgcctcagagtcggcaaggcgcgccttgagttgcgccttctcgaactccagagaatcaatctcgtcttgataccgcgtcttctgctcgcccagcgcgactttgtacttggactcagcgtcatccaccttgcccagggcctcttggacctccaggaaccagtagtcgcacgtgaatttccaggcgcgcttcagttccttgtacttgcgtcgcgtgtcgactacttcctgagtggcggtgaaaccctgctgagagtcagccagagaacgcatgtttcggtaggacccgaggactcgacgcaggtaaccagtcatcttgaacacgcgctcagcgagccttgtgctgttgaagtgacgcaggagtgaggccatctcgcgtcgaataccgatggaattcagggtgttgtccaactcgaatgcggaaagaggcgaacgacgtggacacaggacgtcgatcccagcgttggcgccacagacttccttcaacccctgaagatcctcgtcggagagctcctcgaagccgatcagcgtagacgcgccgccgtagccttccatggcgaatgcacccgcgcaaatgtcgttcacgatccctggtactcccacgagatacgcgttggtcttgagatccggcggggttggcagtttccaatgcggtgggcgctcagggagtacgaagtcggggacatcgacctcctcctgccgaagcatgcctgcgaagatgagtcccctgacgtcctctagcgtcacgtgtcgtggtaacttgaactcaggggcgccctccatgttcacgtccgaggccgcgccgcctgcgtctggcgccttagactctgagttcgcgtcaccagtttcctgggttgcagcgtcagccgaggcgttgtcatcggcctcgcgcatgtccgcgtcagaggtcttgccggtggcgctggagaaggagacgtgcttggtcgcgcccgccttggtgctgcccgtcgaagtgtcgccggacgctgagtcacccgtctggccgctgccgccacctgctggtgtggcgttcgcaggggcgtcgccggtgcgctgctgcgtcggaggtggcgcgctgccggggggcgccgtgccttgagctggcgccgtcgcttgcttgccgtccgaaggtgcgctctccgcaatgttgacgatctgtggaatggcgatgtgaccgcgcattgcccgttggagtttttgtgtttgagaggagaaccttgaagataggtcctgaccaaccgttggggagacagggtgccgccaaagtgagtgaaaccctgggagtcgacagagtgcaacggccgtatcgaagtcgacggtggattgccctctgtggttttgtggcctggccatggttcaccagttcggagcgatttcctctttgatggacccggaccaggaggggcggttgacacgaggcggtccccagaaaattgccgacgatgtgccgtcacctctgtgacttggagtttgtatcggatgctgattggtggatgacttggatacggcgcggctgtacccgtgtgacatggatggcgacagtgggagagaagtgatttctcgggatgaatccagcgcctgaccgcatatgggcccaactggctggaagtgtgaatcctgggagtgcacgcccaggatttcagagaacactcagtccagccgcggactttcccttacgatgagtgcctaaagtctggcggaaagtacacctcatcttgctgtggctcagagtgccccagagaatcaaattaccctgagaatcaacccactaccaccatgatcatgcgcaggaggccgctaaacccgctaaaagtgtggctttgtggagatacacgcgggcctgcaatgtagcagacttgttacccagagtgctgcacggaaacccagagtgccgcacgatgacccagagttcacctccctgagtacaggtgacccagagttccaaagatgattctctgggtttggaccataaatccagactctctatactgaacttaagtgtttcccgagccaacacccaagaatccccacagttccccaagattcctcagaattcccaggatttcagaagatgaccctgagtgtcacctggttttcagggattcgagtcagttcgaagccagtctgcaatcaaaatgatgcgtgaccttgaagaaccgttgtggatgcaaagactggatactttcgaggagtcgagagggagtcctgcaccatactaaaccaagtctaaggacccactattagcactttcggcgccgtgcgacaatggattcgcaagccgatcgcaagtttggaccgctgatcccaaggtatactcaagacaagacattttgacccaaaacatagtgaacagaagatatttgcccgaagaagagagagagagagagagagagagagagagagagagagtgagagagagagagaagtagctgataaaaaccaaacagagttcctgttaccctgtactgcgcaagtgacttcggccaagcctgccgacggaaatccggaggacccgagactacgaccgcgggacgctaagggcacatcaacggcgaaggacagccgtctgtgtggactccatcaactaaagtccagctaggtggggaccagcgacggccttgagcttcctggagtgatccatctattccatatcctagttgggtcacttgctgtgctggtagcccatttcatattattccagagggtattctggggtgctaggtagtcgcctccaggattttgtattgactgcttgtgtgaagggaaggtaactgatagtgattgtattttcctcctttattggaggtggtgcgcatttgtgtgagtctcaggggagctaggcccctgaatttcagactcgagtgagcctagtgtgtgtgacccaccgtccaagggtccaaaagaatacgtgacggcgagttatagtgtttgtatactctgtatttgttggttttatcgagctaggagggcatttgggtaaggtgtcttctgagttccacgtcccggagttgactgaaatcctggaccctgaattcgtgatattctgggtttcaagagatctgattatctgggtttgccttttggtgtggaggtgcgttctgaagtagacgtgcgctcccgcacttcttcgaggctacattttcaaccggtggagtgccgttccgtcgaagacaaacgagccgacagggattacacaaggtacccacgccaaccaaggagtgtgattctcagggtttaaagctttgcggctgcgaatctctgggtctatctttttgctgttgactcttaagtcgattctctgggtctacccctgggaaccgtcttgggctgcgctatacgaacccccctgggcgacaaaggtttcatcggcctcgcctcactatttgaaggggagcactattgcttgacggctattgagcagcaaggcaagacttcaaaaactactgcaatcagcttcgagcgtgcatggttgtgtcggtaccctcgccctaaatgcgtcgtacatgacctgggtcctgaatttacgtgcgatgagtttcagttgctgctcgtgtccatggcaatcaaaggcaagccgatcacgtcgaagaacccccaggtcaatgctatctgcgaacgagttcacttggagatcgtgaatattctgcgggtgagacctgatctacatgaccaactcgatgtggcgctggactacgctgcatacgccatccgggtcagttatcactcggttctccgagcttcacccgcgcagttgctgttcggtgaagatatgatcactcgcgagcttcattttgtcaactggggatttctctccaaccagcgcttcatggccatcctacgcataaacgagcgcgaaaacatgaaaagaattcagcacttctacaaggtcggagatcaagttatgctgcgaatcccagctcacggtcgcaagaaccctgtctctaaggggccattcttcatcaagaaggtgttcgactatggcaacgtctgtctcgacaccggatcgacggagtaccgtgtcaacatccgtcgcattttcccggctgatcctgcatttgttcatttcctggtatgagggagaatgacaactcccacgcaactgtggagccagcgtgcctgtcctcaccgaagatcgtaactcagaactcagcaggcactgccccatgggttcattgggttcactcgaagcttcgtagtagacagctagtaagatgccaggataattttagttctcaatttgcatagcagagttcacgtggatttgcacatgcatggattaagtatagcgcagcaacttcagatagtaagtagggtcgcgcctggtcaagctcgtcgcgtttaggaggttgatgtcgcttccatgcgtgtacagcatcgtccacgcggagtcgctcggcgtgtccaggcactgggtggtcaggtagtgcctggtccgcatggcgatcctccacgctccttccacgagcttgtcgtacacctccctgtgcacctcgtgcagcgtctcctcctgctcgacgaaggccctagccagcaccagcatcacatcgacgtccttcgcggccatccggcacttgtatccgacgcgcgccaaatttgaaactggtgaaaactagcagggatgcggcgtcggcggtgtccggaacgaaatgacaggtacattcttaaagctcatcaagagtctatcaggccgcctgattcagggcgatatcaagcggacagaagtgacgcatgtacgacaattacggtgaagcctttgagcgctatatcaacatatatatatttaaaccctgtccatccatccactctcaccagtggcctggtgagctccgacgacgcgggaggtactacagctccactacgttactagaccgagccacaagacaatgccatcgagtcgcaccgcagcagtgtcgtcgtgagggcgacaagaggagagcggccgggaccgctcacgccggtaggctgaaaggcgacaaaagcggtaattggggcccgagagcgtggcgggtgtgcatggcgacggctaggggcggcgcagcgtccataacgcgtacgtaaaagcagcataatgagcataagagtgcgcgtgcccggattcgaaccagggatttcaccgccacaaggtaaggtactcaccactatactacacacgcgtggaagggtagctgaatgcaaatcactacatacactaccctttggagaggttgatgtcggattattgccacacttggccacaagaacacgtcttcgcagtaccccccccccctcccaacggaatcgatcacatcggtcgtgttcgcgtgaagcgtatgaacaatcgattattgagcgggattggtcgaggaccccacgcacagcaccaattcgaacttcagtaataataccagtgatattatcactgattccgccatgtttttttgcgaatattgatattatcactatgacctgccagacctgagcgatattcgcagttcgtaagaactgtcgtttgcgcccctgcggatgtttgagataatgcaacataaggttttatgttgcattatcggttaaagagcaatttgaaacaacagcaatgacagttgtacagcagttatattacagcatagcagcgcaaacgattcattagagctcagagcatgtttttggcgataaactaaccaggcggagcgataataaagagtggtgatcagtcaatcaatgtaatctgtgaggaatcgaccgtatcggggcagcaagcgagcagagtcgccgtcgtatcggctaagttagtttagacatgtggctgtcatttctgagatacaatatctacatgtacatatcagcagcagcaacaataaaccgacgttgagtaaaacaaaattatcgctattgattaatggtagtgggcgcagagtgtttgttgcgagtcgactagtgaggagagctaaacgacatggaaatcagtatagcaattctacaaaatcaagttgcaggcgtcacaactggacatataaccagaaaaaacacataatattcaacatgaaccgaagttcagtctggcagcttgaagctgtgcagtatgcagcatgaatacatgtagcagtagtgtgagttcatgtagatccaccacggtagatcgagcagcgtaagcgaccgagcaaatggacgcatgatacttcacagtacaaaaataagagcatgtgcaaaaattcaagaacttcttcatgcagctctcttctacggcaagcgtagcgctactacatagtactattagtagtaaataaagtttttctaccgtgcaggttttggaatccagaaaaaaaagcgaccgaactgcgaacatcgcgggccaaagcccgcaaaccagtattagtatcagtatcagtatctgtgataatatcactaatattggtgattcgttgtgttagtactaccgaatcctggcggtggggttagggatttgtggtttggctcaccaattctcatgcatttgaaacgcattccgaatctagtcctgtaggaaatgaacgttatgtacgaagtatgtggtaggaaggaatggtagcacacctcggcaacaaggtcgcgcgggctgcgcaacactgccacgttgtgacttactgtgctctagcaggagctagcctgctgtattacatgtacagacataagtcattgacaacagtatctatctaataggtgcatatctagagacaaaagagacattgtatgtcgcgtgacacttcccgcgcgccaagtgcaagacgtggtttcggaacagccatcgcgatctattcatcgtgttcaaggccctcttgccgtggtgggctgctgcggcgacggacaccaatttggttgcggctcaaaacgcttgcatcactcctttccttttacagccaaaccgctatgcagcgtcatctcagtgcatgcactgacgcagacagaaattctctggaaggacacgaccaaaactgtccacaatcgactggcgagagatgtatgttcaggctcactctacaccatgcatggtcgccttttccttcacgacttcgtcaaagtcgtcgagtcgaacggatgcctgaggctgcttcctcagcattgatggattaaccgttttgctagtgaaaatcagattcatcggcttgaagcaaatgaagccaccgccgatacgacgtcctaacaagaacactgtgtccctcctcaatcatggggggttacaggcttgagtgttaaaaaatatggttgtagtgtttacactttccctggcataaaccctaaagatatttttttctgattacagcttcaactttaatatggttaactagtactatccagtatcaagacggcgtcgatgcatttctcaactaacatcttaacgtagaatatagtcaaagttctcgtgaacattcgttgcaggtcgatttacagtttatcttttacaaattgaaaagatacattttctgatagcaacctcaacttcaatttagctaaaaactataaaatttacagaaagtactagtcaatttaaagtttatggtatataaatattaaatatgttttagttatagcttcaccttctcttagatatatacaaaacagaattcacaaggcgtccaaccatgttttttttattctaaccaaaatcaactaccctgtgtttaaatcttttgtgatgacgcgaaatgtgggtgtggtacgagctggggttcaagtacaacttgccgtttaggcaacagacgtgagttttccccagaagattttcgcgcttgcgcttcggcttgttttccgaacccttgaggtttgcaggacagtaaaactggtgcatgtccttctcagtaagcttgagcgtctccaaaccccagaacttacaggcgtacgtccgtggcagcacgctagtgacgtcttcacgctcccagcgcatcccgggataagtcaagtagcagtttaggcgatagttggcagtcagatacagcatgccgttgtgtatgaggtcgccgcgaaaaacgatcgcaaagcctacaggaatgggtacctcgcgcgccttagagccgtcgagctcatcacaacaatcttcaaacactcggaggctggttcccggctgcaaagcaagcagcatacttaaactggtagacttaatactaagcaccatcctagagctggacgcagaagtcgatggcattaaggaagaccacatccgcaagtttctgcaagctgcacgcgaagccaccaggttggggactccaataaacgccggcggccgcgagttggtaacaggcacaaggcacggtggcaacagacgcaaccgcagccatcgcgacatcagagggagatacctcgccgccggtccaggataaaaacgccttcgtgtccaatctggcggattcgctaggtgccgtggcgatgccaacctccgaaaatgagcagcaacagcggtgcgcgtggacggaccttgttgaagccttgcgcaagaaggccggcacgctgcagacgcctgccgacgccagaaacggacttggagaagctctgcgacggcccaccatggacgaaaccgaagttgcccaggctacacttgacgtccgccaagctgccttggatctcgccgctctgatggcccgccgccgaggagccgatgatgcagcgagggcaatgaatacggcgttcgacaaatacctgacctggcaaaaaaggtgcgtaatggagaggattggagaagaagacggaactctattgtacctggtggagttgggggccgacgtggtagccaccgcagcacttggaccctgagcagcttcgagggccgtcgatttgtgcgcaagctcgtcgacttcgaggcaaaagacgtcccagctgggaaacctaaggtatcgttcaacaacaaacaggcatacccaccgaaggaaaaaaaacaggctcagcagaagtgtaggcgtagtaagtagaagagagctcgttaatctgcataatactccctccgtttcagattacttgacccgtttcacttacatcgacctgctgaaattacgttggttggaacccctaacaaatcgcacactaaaataaagagcgcagcctgctgcttcatggcgtgataatcatgcagatttacggcatttctcctcctttgcagcgtccagaacgtcgttggtccatacaataatcaagtgagaatagacgtctgtgcattataatcgcgactagggctttcttctcggtaaatcctagtttttaattattaaaaaattaaggacacggcgggaatcgaacccgcgcccttccgcacaaatggcggtgctcttaaccaattgagctacgtgcccaaagcccactttgtatcaacataacacgcatttattcttgtggtgttaaaatcttgaaagcctctacctgcaacctcagcagttttttttttccttctcagctctatcgtgacttgctagaaaatgataggcagcaccctccaagtacacggacgaatcgcacacatagtttcttccgagaagtccggctttacgaagcttggccttcccaatgtgaggtcgcttgtagctgttgtttccgtggtcttggatgatgcactccataaccttctgcagtgacacaaaagtatcttcacgtgcgctatttttccggttcgccaacgacgcgaccgtacaggcaatcagctcgtcgatattgcgtggacactcctcgtactgaagcgcttgaatcgagcagaagtaccccaaatcaagcgtattgaggtcggggctgttgggcggctgtacatcgagagtgatcttccaaacaccttcctggcatgctgcatgaatcaatgggtcgtgggggctgacatgacagcgagttcctacttgctgaatgatgagttcagtaccgcggagcgtaggagggcacttcgacttgatggcgggaatgacgttatcaatcagcatcgctatctgctccttgcgtccgacgttgacagaacgggtcaccagcgtacccgcagctctgtttcgagagctcttcagagctgaaacgcgctccacgaagggccacatgacgatcttcccgtcaaagaccatggacccgtcagcaccgtagataggctgcatcacagcagccatgaacataaccttcgtggtgaagcgttttgactggacagttcggtgcggcggtgtctcgttggatgccatgcagatcgttctgtcggcttcggtcatgtaaaaccacttctcgtcaatgtagatttgttacgcggtgccgtcactaaaatttgggtcatgggaccaaaacccgggaattgcccagattgtggagttcgcggattggtggaaatatgttggtcaagaatgatgaccacggtaccagataagtggtacattcttggaacccgacaatcgtgcctgggattctgagagttcgtgctggacttggagccgaataaaaacaagagtatgtttgtggcgaaagtgagaccccggaaagcaggtcggtgtaggcgaatggatcccgttcctagaagtgcacaggaatgtgtgcgaccttccctacgaatctgcgcgaggcggaactcgactctggcttacaacctgggagctgaggcacttctcagattccccgttgttttcccagaataacgactcccaacgttcgtgtcctcagacttacttcccacaaaagtccaagagcagcctctgtgcgaggcgtttcaaggctccaaacccaagaacacttggtttcactatggcatcttccaagatccgaggtgtacccaacaactccgagaaggtatccagtctggcgacccttcacggtcagaccaacactccgccgaaaaatcgcagtctccgaggagtcgcttaggaaagatttcgtctgcatgtgacctttaaccaaacagagttcgttttgcttcgaagggcacgagtgcttctttcacagcctggaaggccgttctccacgacaaaattcaaagtactttaggtaagtgatccactgcttcggcctggaggtgatcatatatattccatatctgtatatttggcggattgcagaccgtctttgctgtatatttgcggtctattgggcttgtgtcgaactgaagaagttggcgacagggtagattgtttcctctctccgagaggtggtgcgcgtccccaagattgatcaagtgtcttggatttggaccagttgacttgtgttttggccttagccttgggcctagagaaagaagagagggcaaaggagtatttgtgtgattgtataacgtgtataactctatttgggttggattgttctagcgttagcccggcgtagctgtctgattcacggggtcgatactaacctcctggtgcaaagaaccgctacccaagggatacacatcgtgtgcctgaccaacatcgtgtattggacaacacacaccctgtgccagccgaggcggatccaaagctctagtagcctgaggtctgtcaaggagggcctatagctgttttctgggagaaaacaccgcatcgcctcgtcacagctggtgcgcgtgcccggatcaggggttggaagttgaacgtgcattgtgagagttatgcctactaacgctaacgcgattgtgcctgcttcgagtcctggaagatgcggacgaggtagtggacgcggtcaacgtgctcaacgagtgtcaagaccgctgcaactccctgtcccgcctccggggcccggacaagatcctgcgatgtcgacggagaccgaacaacaactggcgctggccgaaccagcgcgcccgacatcgacccattcgacgccaagacgagcttctcaagtgatggttccccgttctgtgcagtccagccctggacggcccctagaccgtggttccgacgctcaagcagcacgtctgccgacggagttggcgctgagccctgcggctgcaagcgcccttggaaaacgtgatcatgtggcgctgcgagagtggcgcgagacgagggtcccggattccggtgcaccacaacgtcttgggcctgctcctggcacccgtgtcttcggacctgagctgccaatcacgctgcactcgacgttccaagatccgcttccgctgattccacggcgcacgagtgaaatcccaggatccgacgtaaactgtcttgctgacgacgaagcccgagcgtatggagccgaacatctgagccgctggagctctcttccaggagaagtcatctctccagtcgacgtcgtctacgacgagggagaagaagagtacgacatggaggcttaggtcttcgatgcattcgagactgggaaatacttgggtcgtgtgaacgctggtcggacttccgagtcctggatcaaggcgttgtctgccaaacgcagacggcaaccgctggtctcggacatgaaggccgtcaccatagttgcttccggctgctgcatgcgacgctgtgctccagaccatgttgatggaggccggcttcgagtttcgcaatgtgaatcctacgtggagtgaagtccgcgcggtgtcagaggtgtctgagaatctgatccgccgaggtgttgaagaagttcaactcagactcgcagttgagagtcttgagtggaacaagctgatggatggcgtagggtttcacatccgacagccgctggagcctctcccagctgtgcaactatccgagcgaagtacaagttccccgactgatgccgatggagacgtcctaatgacggacgacgctgtggaactgcttgccgaagaattattgcgccgcttgaggatcacgcggaccagaagaagaagtcctgcttcaagcgcgtctgtacaaccagcgcccaagcgtgcggccttagaagctgagcgatctccgcccagttccccgatgcctccgacatcgtcgtcccagagtctggtgccccaaccatcggtatcccagaacgtcgtgcctcggactcagagcctagtccctagagctccaagtcctgagctaatggcgagtgtggactaagttcctagtctggtgggaccaagtggtgcttccgacgagtcgatgaacgcggccgctgaaggaacagacctgtcggggcactgctcctcaggatcgtcgttcttgtccgccgcggactacatggctggcagtgccttgggtcatatgcctggaccaagcccgatggcgatggtaatgattgcgcaggagagcacggctgcagcagctgccgacccggggctcggtgtctcggcaggtgctgtgcagtatccagtgccagtttcagcacgcccagcgccttcgctgcagccccttcaggaatcgcccgcgcatgtaccgctgcccgagtcatcagagagcagcacaagtctccagccagaacactcgacgcagcctgctccaacgtcgttgccccctccaagcttcgtgtcttccaccacacccgcagccggcatgaaccgtggcgtctccacatcaagtgctatgccacggactcaagccacttcgacaaaggtcgcgaacccggagtctgagaagaaaccacagaagtccgtgcattctgggaagtcatcgcgatcccggaagtccgccgcgaaatctgcgtcgtccaagtcttcgatgtcaagaatctcctctcgtgtgtcgtcctcgaggtcgtcgcgttctggcgcgtccgaggtcgccctggtcatgatgaggcagcaggaggccgccctcaaccaagtacgcgccgacatggctgccgagttgcgtggcattcgcctagacaaccagcagcagaccgcttccctcatggagcgtcttcaacggagcgaaaaagcccttgccgccgaacgtgagtcccgccggcgcgacgccgaagttgctgaagctcgggttgctgccgcggtgaaggtagagcagtccccagtaccatcgtcagtgcctgtacccgagatggggcgcggcacacttattccccccgaagcgccattgccgagtgcggccctggacgccgccaccgctgctgtgttggcggcagccgaggaagtgaaggcagagagtgagggcatcgcgcagagcacgaatgcccatttggccgcgttcgaggaccagttgcgcaatgtcacgtccgcgtatctgcagaagtgcgccctggcccagaaggttcaacgtgagaatgatgctcgcctacgtcaacaatcgactagtgtacctgaatctagtggaaaagccaccgcgacgagtcgaacttcctgcgacaaatttgcgggacggtcgcccacttatatcgggcaacagcaagtggccgcggattcgctggcagcagcgcagcttcaagcgaccatacaagctccaagtcaagttgtcaaacgcgagatgggaccaggcgagacgaagccgactgagacacgtgagacaaggtcaagtgagatgaagacacgtgcgacaggcgggacggggtcaagtgagaccaagcgtggaaggcagccgaaggctgcgacacagactcggtccagtgtcgctgcagtcaaggaagaaaactcggaagagaccaagagctcagcgaaaggtgtcgctcgggactctgcgagtgggagtggccatgtccccagatattctgggaagtcggctaataaaaagtcttcccagaaacacaagcgtggaaagaggatccgtggcagtaagcgaccaggtggcgatccctcatcgtcagattcaagttcaagcggcagcttgtctagcagcgagtccagctcgggctccgactccgactgggagcgcggccttgctgacgaactcgcccctgcaacagtaccagccgctaacggccaatcgtacacgttccgcccctatatccagtatggggcggtggagatgtttgatccccacgccaagctcgaagaccgcgtgaactgatgggagccgtttgtctacgctgctgcgttgggagtatggccggagaagatgaagttgcgtcagctcctgggccgactacctgccccgctacgtgcatggtttcgccaactacccgagaaggaccagaaggactggtcgcgcttgtcgaagctgtttcgcaaggagtactgccgcaccgaggcgtccccgtacgaccgctattatgagttgggaccggagaatggcgagtctgcgcgatcgtttctgtatcgactcaacgctgcagccaagaaggccgacgtcgagtacgaagactctccgagtgaccgggaactccacatccgtcgctttatcaagaagctggcggatcgtcatctgaagatcacactacagggacaaacgtttaagtcgatgaaggaactcgagaaaactctcaagcgtatcgaagcggtgcagcgtgatgatggatatgaaacgcctccacctccaaagacccgcgatgcgaagcctagtggtgtgaggtttagtcgattccctcctccgcgtcgaactcaaggtgaacgtgcgtacttggtgaagaacctggactcggagtcagaagacaaggctcccccgccctcggactccgaagagaaaccagaaccacgttatctcccgggaactccgcccccgtccatggggtgtacggtgaattctgagaaggtcaacgtagcccaggcttctgagactatcgtccaagtacccagacccccgacgaccgaggaggtgttccgtgctgctgagcagatgggttggcgccctccaattccacaagcgcgaccaccatctccataccgagacaactcccaaagaactcccttctgtgaaatttgccgcagttttggacacggcgctcagaattgttggcgggatctgatctgtgaccgatgccatgaagctggacacccgacatattagtgctcgcgtcgcccatgttccaagtgcggagactttcaccgtgaagcctctgtgccgattgggctgctttgaaggcagtccgggaattggcgcgataaggagcgctgcaagacttgccgaccgaagttctgaagcaactgctgaaagaacagctggctaagtctgggacgtcgttaaacaactaggctcgctgggtagagacccagtgcgtgtcgagcctaagtcccaagcgtattgcgctcttgcatttgtcggtccagaacttaggcaccagatcggtaacccacaatgcatgactgccattgcatgtgaagatgaatcgctgttggaatcgcgcccggtttctcgaaattacgttttccgaagttctgcatttgaagatgaagccccagtggaattcacgttgaacccaggagaacgttacgggtggtgggcagaccacgacttggataatcaagatgcagtggcattagtgcatggggcgatcaacaactatcggacacacatcattctagattccggcgccagcacaactatattgagcctagaccttgcacgcaggttgaagcttaagttgacgtcgcacgccggactcaaggtgaaaggtatgggaggagtgatcacgtacatccggtcgcggactcgagtgaagttaactctgggaatgcgtgtggtatatgtgctggacatgtgggttggaaacattggagatggagtcacttgtctgctgggtatggatttcatgaaagctgctggagtacgactgtgtgcgcgtgagcagttggctaagcttccgaatgaagaagacattcctctggttggagagaaggaagctccacgttacatcttggaagttccgatttgtgtgcgtgagccggtgtatttggctcctggtgattcgatcactgttccggtacggtatggccaagctgacgctgacacagctgaagtatggactgcccgagggaatcaatgggtgacgcaagtgatctacagctccagacggcggcctgccgcagttcgtgtggtcaatatctcagagaagtggacccagatcatgcaacacacggtggtagcagcgttggtggggcctgggcaactgccacgaggagaccgctttgttcaaccgaagtcgtgtaagtatcgagagtggcaacaagagatttaccagaacaccccttcgcgggagtatcggcgacgggaggagctggaagcacttgaagcctaacggaatgccccacccgcagtcctgcggcctcaatatgtttggccgacgaagattttgccacgtccacctgaagaagtccggaaggctgctgagctacagaagtctcggaactcgagtggccaagccgtgaactcttcgggtcagactgaagatgcccgcagttactcgagcgctgttgctgatgtgaagattctggatctgggcattccaactgccgcggaagtcactcccatggacgaagccgaggcctcgcaggcagatgagttagatcctgcgaaggagcccgccattgatcgggattctggtgatgtcgaccgcactgattggtggaggtaccagtagtgccgaagctcgacatgaattgaagaacgtgtttcgcgcagagccagtcaagatctgtgaggatgccctggagcagctggaggtggcgtacgcgatttgtcttcgggtggtcacagctgacttggatcctgatgaagaagtcttcttccatgaaggaaccgagctgttgacgcagttacgagaccagttggctgtactcccagacttgaaggatctcagcccgaaggtgaacatggatgaagctgatgtggtgtcgaaggcaagaacactcctgagatgaacaaggagatgagaggtatcttggaatatcatcactcgatcttcctaggagatggcaatgctgtccctgcacctgccagaggagttgtctgctacctggatgttgggaacgcaaaaccgattgcccagcgcgctcgcccgattgctccacgcttcctccactaagtctacgagctgatcaagaaattgttggagaccggactcatcgagacttcacatttggagtgggcctcacccatcgtgatcattttaaagaagaacggcaaggatatcagactttgtatcgactaccggatggtgaaccagctcatcaagctgtcttgctacccgctaccgttgatagatgacttgctgactggacttgaagctgcgatgtggtttatgagcttggatatggcgagtggcttctgggcggtgcccatgacccagagggcaaagctcatttctgcttttgtctgtcctcttggacaataccagtggttgcgcatgcccttcgggttgaaaaatgcgcccctgatataccagcagatgctgaacaactgtctttggggttttgtgcgactgtcgcctgaggaagaagccaaggtcgatcccgatgtgcttgagtttctgggaattaaggtagacgagcgagcggtccccgattctggagtggagatcccagctctgacagatacaatgactgttttccaccggaacattccagccccagtttcaatgggcccagtcctgggtagaagctcatacattgacgacatcgcccatggggtgcctacctgggaccagctctgctcggacctgaacgcgttgctgttccgactgcgctactggggaatctccgtgaacctacccaagagcgagttcgggaagctgtctattccgtacctgtcgcatgaaatcagcaccgagggcttgcgagcaaaacccaagatcgcgaagggtgtgaatgatttgccatttccgtcgacactcaaaggcgtgcagtcatttctgggaagcatcaactactacaacaagtttatcgaggatcttcctgttatagcatcggtgctttacgagctgaccgaggagcaagtccgggaaggacgagacttggggcgcgccaaagaggctttcgagattctgaagaagaagatcgtctcgacgccgctgttacgacacccggaccgagagaaggactttgttgtgatcctgcatgcgaatccttgggctgcaagtgctgtcttgggccaagaatatgacggtgtgatttttcctgttcggtacactggcaaaaccctcaatgagtctgagattaagtgagaaagaggtggtggcgttgttgcgcgttctgcgagtgtttcattgtatgcttgctgggagtcacatcaaggtctacactcattcctcagtcctgcggtggattttcacttcgtcatcattggagggacgttgtcaacggtgggccaccctgctctcgccttgggatctagaaattcaccggattgagagggacgaggatggcctggcagccatcatgggcgctgggattacgcctcgtgaacatctcgataaagtggcagaatccctgattccaaggaaaggacgagtgacacctgccccaccgattagtctggagatgttggaagaggatttctcaggttacctgctcagctttgatggcgctgcgaagacgtctaccaggcaaggtagctgtggttgtatcttgtggaagctcccagagtggactgtggtcagcgcgcgaggttacttcctggaagatgtgacggtcaatgatgcagagtatcatggcttgatcaaaggagcgacactggctatggagcatggtgtttacgacttggttgtcgtcggtgactcccgaatcgctattcaacaggcccaagggttgatcaactgtcatcaaccgaacctgttaagtgagttcgattcggttcgtcagaagttccagtctgtgaagttgattcatgtgaagcgggaattcaaccaggctgcggactatctcacgagtcggactctagccgctggagaatcactggttatcgatgatcgccttgagctgtcgcatttgcgtttggtgaatcgcatccctgagaagctggtgaaacagtctgaatctggagttgtcgatccattggtcgaaggcactgctgagcgtcgagtactgagagcagtcgtagatgcgttcccagattatgacaacgcaccactttctcttggcgcgcgcgtgctagccgctctgacccggagccaagcccaagcggaagttcgtgatgcagagtagacggagtctgataccccaggcatgacacctttggagttccaagcagagcgctggtgccgcattaaggctcaccaagatggcgacccatggatgcgacagttgaaagctttcctgcgaggtgatctctctgaacctctgaactggaagcacagaggatggcgaagattgctgacaattatgtcttggattcccgagacgttcgttactatctgagccgatcgactgcttctaggccaagagatgcacgagatgaacctcgattagtggttcctcacgatctgcgccaggacttgctgcatcactgtcacgaagagcttcaaggcggtcaccaaggatttacgcggacgcacgaacgcctgcgtcgagagttcttttggccaggcctctacgctgatgttgaacgttttgtcaaggagtgtgtggactgcgcctctggaaaggggaagccacctaatcccggaccgtcgcctgggaatattgagcccaacgctccgttcgaagtgctgtcgatggactttgtcacgcacctcccgaaatctgaacgagggaatacgtttctcttgctttttgaagatatgttctcgggtttcgtgatgtgtaagcccatgagttcgacgacagcacaagacgtagctgaagcttatgaagaggctgtcttccggcgcttcggtgcaagctccatgctcaggcacgaccaggaccccagatttatgagcgaagttttcagtagattcagggaaatgctgggcaccaaacagcgagcgacgctggcgtatcgccctcaagccaatgggcaacaagaaagatcggtgcagactatggtgaggggcatccgggcctatgtagcggaggcagatcagagcgactgggatgatcatccggagaagttggtgttcgccttaaacacctcctctgattcgacccggctcgaaacgcccttttatctggtccatggctgggatgcgaagagcactgtgtcggctatgttaggtccaccacccacggggttggaacagaagtcggcttacgagtggagacgcaagctgcaacgcgattatagtttcgcccatgcttgggctcgagacttgcagaagcaagctaaacggctgcgctcagaagcccagactcagaaatggcaggaactctcggaaagactcaaagccggcttccaagttggagactctgtctggctgtatctggctcgcgtgcaacctgggttgaccaagaagtttgcccacatgtggcatggtccctttcgaattgaagaagtccgggatgattttcgcgtacggctaaagatcgaaggcaccggctatcgaattggtccctgggtacatatcagcagattgaagccaagagcgctcttcccagaacgcccaacagtggagatcgaagttgcagaagaagatgacttcgatgcagcattattaccggaagacagctggggccctgaagagcaatctggtgtgtacgaggtagaagctatcaaggacattcgctggacgaagaggaccaggacatctcgaagagtccgcgagtacctcgtgaaatggaaggggtactcggacctggaatggctcccgacaacgcagctaagttgtggtaacctgctttacgaatttaaccaaggcgctagagcgcgagctcgatttcgggcaatgcaagcaggtgatgactcagacgctgtgacagattcccaataattctgggattctgcgctcgatgtgtttattgcgtatgtataagtctatcgctatgatgacccgacccaccaatcaaaaacaaactggtcgcagaacgacaattgatgttcggagaagtgatgtggcaaagcagatggggtaattgatcgagggaatggaggtattgtggagaattacgtggaacttgttgcacctcgctgcggggacccatggggcttactaagttgtactctgaggtgctatgacatgcaaactacgacaagaagggtctgctcgcgctcgcactcaggctggcggcagaggtaacgggttctggcggcgctgcgtgggattcagcatgtctgcgcgaagttcgactggggtgagacgcaggaaggcgtcgtcgttgcgtcgcgtcgcccactgggttctgatgggttcgtcttcgtccaaagcagcaagctgcatgaacacgtccggctcgtgctccaagtcgcgccagatccaagggcagcagtagatcggcgccacccagatgccaggttccaccaaatagtcggcatgaacccttccgtggcttccaagagtgccacttgttcgtccaggtctttgcgaaactgggagcgacgcactttgcggtcggtatgaaggcctcgggattggggttcggattcgtcaattgtgacccaatgtccgccttcccagtatagccgagcggctttgcgcatccacccgatgaagcgagcaatcccgtgaaggaaatccagttggagctgttggcgcaggtgaaagtagaagaccttgacgcgcttgtcatacatggcagcccagggttcaacttggagtagcttctcgtatttggctcggtcccaacgtgttttgatctcgtccatatgagtcttgactggcacgaagctgggaaatcccagattctgagggacctggttggtcagcggctgcttctggaccagaatcccgaagtaacgccagcttttgtcggtggggtccggaatctcgatgatgttcttctcttggggcgtcatgtcttttagcgccttcttgtacagccggtacttcgaggctgggactttgacaaccaccaagtcttgcgttgacactgagctgggccgcgccttagccggaggcttggaccttttggaggacccaccactttggcctgaagccttgcgtttccgggccgagtagtcttcatcccccgtgtcaccatgcgaggagagagatgagaagtccgactggaaggtgttgctgccatcatccctgtctgagttgcctggaagtggagacagggactcggaaggagacaagctgtcggacggcaagtcaggccagaatggatgcgcactcgtacgccgggagaggttctgcacagcttggtccaagaagcactctgggacattgcgaacccacggcgtggaatccatccggttccagtacgccattgattccagcatcggcattagctccttttgccggaactgcgtatgcaacgcagtgtccatccgagcaaacgccagcgagtccaagtacgacgtcccaaagagcatgagctccttggcgtcggcgcgcacttcactccatgtcactgtcgacggcagagaggcggtagctcgttctacacttacgacatacttggcgttgcgtgaacgtgcacccttggaacttcccgggtagtcgctaggccgagcttgaggctgagacagaggctgcatcgttgcaggctcgggtgtggtcaagtccaccaccgagtgtgagctctcgctagactcctctgcggacccagaccgggctttggcagctggcttcggattacgtgcaggcttggacggcgacttggatttggcactgggcgtgggcgtcttcttctcaggaatgggaggttgcccaactgtgactacgctgtggcagcctctagacaagtccaattgacgggctgagtctcgacgaggagaggcgacgcgtcgaagcccctcagaagtgacttggaacagcaccgaggttggtgctggagccttggtctcggattcagcctcctccagcgcctcagaatctccatggctttgcttttccactgcattatcggactgcgcggcccgttccgtggctgatggatacggaggcgcgttgaagtcgaacgcccgcaagtcctctacgtccacacgcgtcacccaatctggagacggggctgtgcccgtctggtaatgctcaagcaaagcaagcaagtgtagccaattgccccgcagacggccgtgttcacgcaagaagtccattaaggaccaagggtctgaaagccgggaattccgtagtcgagtctcaagcaagccacttgctgcctcggcctggtgtgctctttcttcgctagcgtgaaggcgcgtcgtcagctcctcgatgcgccgatctcgttcttggacttcaaacgcatgacgacgcttgctctcgtcaacgaagcgttcgtgagctgcaatgccgcgccgacgttcaacttcgacgcactcggaccaaaatgcccgctggttctggagctcgtggctcaggcgacgacacttcgtcaaccatgctgccgtgtccgcgacttgcggatcttggacgagttgcaccagggcccgaatgtgcgcaagaagcaagtgaaggtaacgcggcgaggccagtgtgcgacgcgcgaaatgttccacaccgaagtaacgaagtgcgggaagcgcctcgcgcagaacctgcgcgcctgaagctgccagagatgctgcttggggtagcggcatggtcagaacaggttgcaatgtgttgttgcgcacgtcctcgtgtatgattcgcgccagatcggcgaagtctcgatccgacaaacacccgccttcgacgaggcgctcaatcccgccgtcgccatctcggacgggtgcgtcagcagcgatgtcggccagtgtagctggcacccccaccaacgcgggccgcgacacaggaactccgtgctcactgaagacgtagcgcggtgtgacgagacgcacgcgcgggggcactgaggacgagcgtgcaaacgatgttgccgcgggctggagtctgcgcgcagaagctgctgttgactgtgagactcggcatcccccgtcaccactacgaccacggatgctagagctcgaagctggtgtcgggtctgccggctgctgcgacccttgctggctgctcaggatgctggcgctggccgtcgatgctctcgcgagggcagcgctcaacactacgcccacgtgtgaggcccccgtatccgcgaggagttgaccttcgcttacagcagctcgcgccggtaccgctacgccctcgtgtgaggccctcccgtccgtgaggagttggccatcgccggacgcctcggacatcggctcggcggcaggtgggacacgttgctcaggctgcccgtgttcgtcgctttgagaggcgccttggtcttgttggccgtcgtcgccgctgcttcctgtggcttgccccgggtcagctggtggtgcacgtgcggccttggacggttcagcggcagcgggcggtgatgccatgcgggttccgcgctgctcttgaagatggtggatgcttggtctttcgagaatgatctcgaacgacgctcttcccggatctcgtgtgacacgcgtggcgacaaggtcgcccagatttgggtctgcgttttgggcaagtcgacccatctcggtattgaagttgcctctgtgggtcaaattggccaatgggtcatgggaccaaaacccgggaattgcccatattgtggagttcgcggattggtggaaatgtgttggtcaagaatgatgaccacggtaccagataagtggtacattcttggaacccgacaatcgtgcctgggattctgagagttcgtgctggacttggagccgaataaaaacaagagtatgtttgtggcgaaagtgagaccccggaaagcaggtcggcgtaggcgaatggatcccgttcctagaagtgcacaggaatgtgtgcgaccttccctacgaatctgcgcgaggcgggactcgactctgggttacgacctgggaactgaggcacttctcagattccccgttgttttcccagaataacgactcccaacgttcgtgtcctcagacttacttcccacaaaagtccaagaacagcctctgtgcgaggcgtttcaaggctccaaacccaagaacacttggtttcactatggcatcttccaagatccgaggtgtacccaacaactccgagaaggtatccagtctggcgacccttcaaggtcagaccaacactccgccgaaaaatcgcagtctccgaggagtcgcttaggaaagatttcgtctgcctgtgacctttaaccaaacagagttcgttttgcttcgaagggcacaagtgtaacggggttacacgcacaagtggctacagtcacttgtaactctaacagacacgacgtctgttagaggttcgaaagactttctcgtccttggtgtagacacaccaaaggctacatacatttaggatcaccacgacgggtggtccatagagacttaggattcctattggttgagagcagcatcttttagccaatgagtgacatgcatagcattggaatgctgccctccagccgttggcagattcctattttagaatattacatttagaggaagtcagaaacataaaacaaaaatagcagttctcatcttttaccaaaacacgctacttggagtctttattttgtttgaagtatactcatggatctcgagtatacttaactcaagtaaaagaaacccacgcttcctcatacacttgcgcatacgtgtaagccgtagtagtgagccaaggtaggcccactacacctggtagcactttgtagtccgtccaacgatcgactacctgaacgttcgtacggagctgtacgaacgaggagccgagaaccttttcatgagcgcggaggtgcccatggaaagctccacctcgcctgcaactcatgttgcacgcgctgactgcctccacctgtcggatccagagtgggaggcactccaacgactgtcaacagtcattggagaagcggcagtagctgcgatgctgcgtacgctatcgccgacagagcaacatggtgttgctctgggattcatcatgaaggagcagcgtgatgctgcttcctccatcacggtggcgtcggggacgacaccgcgcgagcaaacgttgaagctaaacgtgagcaactatgtcggaagagagggcgagcctctcctccgttggcttgtcgaactcgacactgccatcgcggctcgacgtatcgtcgacccgttgtccaaggttgcgttcgccatgtcatgtcttggcggacgagcgagaagttgggcgtatggacgccgactctctgatcctacgtgcttcagtacgtttgagggtttcaaggaggaactcagacaagcgtttgagcccccgcaaaatgagtttcgtcgagggcagagttcctcgacctacagcagggtaagcatgatgtccatgcttacgcgcagagagcacggtacttggtctcgaacattgtgaccaacccgatagacgaggcgaccaaggtcgtcacgttcataaagggtctgagagatgggcctgtaaagacctatctcttccgtgagtacccgagtactctcgaagctgcaattactcttgcgatgcaggaggagtttagtctgaggcaggctaaactacaggcgaatgcgccgaggctgcaaccgcctccggtcgcgatagcgggaggtccggaaccaatggacctctcgaatgcaacggctgttggttatcaacagcaacaagaaagtaatgtacgatgcttccgttgcggaaggatcggtcactatgcccgagagtgcacggcacccgtgcaccgagatggtggtcgacgcggcgatgccgggcaacgtcgcggacaaacaaaaaacgctggaacccagtaggcgcggggcgccctactggtaatgcagttccgcgtgtcgaccttggacacgcgacactgaggactgcagcccccagtgaggttcatcctcactgcaagaaccaagatgacaagcctgaccttgtcatcctgaatgtgaactcgatgagagcaagcggctctctccgtgctttggtagattctggcgcgtcgaacaactttgttcgactgcgaagtctatcaaggcttgacttcgaggaggtaaagatacctcgaagtatgttggaggtacgactggcaacgggtgccgtcgtgaagaccgagaagcgcatggtacgcgtgcgcttcacgtatgaagatcaagagtttgtcgagacctttatcgtcctggatctggacgataagtttgacattgtattgggcatgccgtggcttgcacggcatgatccggtcatcgattgggagaagcgcactctcgtgcgcttcggtcgcgatagcggaacagagagcgatggacctgttgccgcaacgcacgcaccgacaggtgcgcgcgactctccagtcaggacagcgcctaatgccgctgtccaggagcgccctgggcgcgcgcgagcacacgcgcaagagcagcaagcgtcggcgtcgccgccgacggctgaaggagaaaatatgttgatctcggagatcgacacccgcttttcagcgaatcaggaagagtctccggcctcaaggggcacggatgacgcaggcaagtcacacgcctcagccgtggaggctgacgcgaatctgattggatcaggtctggccaatattaagagccaaagtgacgaaacgccgtcgactccgggagtcgatggattgggtgaatttgattcgtcggctcggggagccgacgcaccctccgtaatgggggtctctgccaatggttggcgtcgaggtgaagatggcgtgtcggctccgggagccgacgctgcaggcggtgcggacggttgcaaacgttccgcaccggaaaaacttgcatgctatcgtgcagccgggctgcacgacgaagcgccgggcgaccaagccgggcttggagtcgctcgcccgcgggatgaacccgccggcggtactaaagaagaacacccgtccacggctgggcctggacgaggtcgagaaccaagcggagccgggctccgcaaaacaagaagacggcgcatgcgaagatcgctgcgcatgtctcggcctggggccgagacgctacaaggaatgtctgccgggcagacggaggctgagaagccggacgtcgagacgttgaacgtcttgacgcgtacctgtgccgggttccggtacagggagatgactctcgctaaccctccgacacaagcatcggagttgacttcgcttccagtcatgagctggaagcgcttcgcgcgtgacttgcacgatggacgcatcgagcaaatatgcattctctcggacgccgagagaacgaagagcgagaatgaagaactgaggcagttcttcatggagaccaccactgagagcgaggacactctcagtgcgaagacgaagaaggagcgctttgaagagcagagctgggactcgttgaaaacgagtccctactacgagatcttacgggagtacgcggacgtacttccggaagagattcctgcggagcttccgcaggacaagggaatccagcacgagattgatctcgtgccgggcacgaagtactgtgtcacgaggcagtggccactgccgcgagagcaggtcaaagcgatcgacggctttttcgaaagtcgtcgcaaagctggacaagtgcgggaatcaaaatccccgcacagtgctccgacgttctgtgtcaagaagccacagggcggctggcgcatcgttcatgcgtataacaagctgaacgatgcgacgataccggcgcagacgccgatacctcgaaaagatgttatcatcgattcgatggccaggagcactatctacagtgctcttgatctgcgcgatgggttctatcagaccctcatgcgtgagagcgatatccctctcacggcagtgagcacgccgagcggcatgctctgggagtggctagtgatgccgcagggtctgaagaacgcccctgcgaccttcaacaggtgcgtgacgcacttgttgcgctcggtgcgcgacttcgcaccgagctacttcgacgatgtgttcgtccacagccgggctgcggacggaatgagcgatgttgagatgcacaaggtgcatctccggaagctgcttgcgctcatgtgcatcttcggggcgagcgagatacccgtggtcgggtgtctcgttgggaagaacggtgtccgccctgaccctgagaaggtcagagtgatcaatgagtggccgacgccgtcgaacgtcaaggaactgcggcagttccttggcttggccacgtacttgtgcaagtacgtgaaggactacgcgggcatgatacgcccgctgtcacagctcctgaagaaggacgtcgagtggatttggactgctgagtgtcagcaggccttcgatgcagtcaagcagggcttgactgaggcgccgatcttggcggtggccgaccaagatcgcccattccacgttgtgtgtgacgcatccgacttcgcaatcggatgtgcgttgatgcagcacgatcacgagggtcgtgatcgtgtcgtctactaccaatcgcgtcagctgaagccagctgagcgcaactacccggtacatgacaaggagctccttgccatgaagtacgcactcgcgaagttccgagtgtatctactcggaagcaaaccgttcgtggtctatacggaccacgcgtcgttgcggacggctgtgaagtcgccgcacatctcgcaacggatggcgagatggctctcattcttcgcagagtataacttccgggttgagtacaaacccggaagactcaatgtggtggccgacgcgctctcgcgtcgacctgactacgccacgactgatgccgacgtcaatgccattgacgccatgcgatcgagcaccccaatgtcgtcactgttggacgacgtgaaggtcgcgtacgcgcacgacgcggacgcgaagctcttgctggcctacggctcagcgccttctgaccaagctcgtcagaagctgccgaaacatcttcgtgcttgtgcacaccgttaccgggtgcacgacgggttattactctacagtgcagtcgacgacaacgcggaccgtgttgtcgtgcccaatgaccatgacctgcgactcaggatcatgtatgagtatcacgatgcaccgactgcggggcatccgggccgtgagaagacataccttcttctcacgcgagacttctactgggcccaccagtacaaatgggtgcgcaagtacgtccgtgcttgcgaggtttgtcaacgtgtgaagcctgcgcctttcgcgcaggctcccttgcagtcactaccaactccacgggagtgttggcagtccatgtctttggacttcgtgttcggtcttcccccggacagccaggggaacacgggcgttgtggtctttgttgaccgcttcagcaagatggtacatcttgctgcagtacccgctgaagtgactgcgaaacagacggcgcgtctgttcgttgacatggtgttcaaacaccatggcataccgatcgacattgtgtcggatcgagacccgcgcttcactgcacacctctggcaagaagtgtttacacttcttgggaggcaactttcgatgtcgactgcggaccatccgcagacggacgggcagaccgagcgcgtgaaccgcgtgctcgtagacgtgcttaagagctacgctcactcgttccaacactggagcgagtgcctgccgatggcggagttcgccatcaacaactcggtgcatgcctcgaccgggcatacaccgttctacgtgaatgccatcaggcacccacgcgtcccgagtctactcgggatggtggctccttccttaagtgggggggggatctacgactccaacacagcagccgcagaatgcctctaacacttgtacagtgtcagccgcaacgacacaaagcaaagccgagaaccgcgcgtttgtgcagggcacagacgccgacaagagcaaaaagaagaagaagaacgggtctgtgcagggcacaaacaccacgaagaccaacgcagaggcagggcctactgctggaagcgagctgaacgagttcagctcggacgcaattcacttcgtacagcgcagacaagccgtcattcggtttgtccaggacgctattgcagcttctgtcgaccgacagaagttgaacgcagacaatgttggcaggggcaacactaatgaattcgagaagggttcattagtcttgttagctactcaaaacctgcctaaacatgccgtttccgacttcggggcgagcaagttcgctccgcgcttcatcggaccgttcactgtgctggcacggcacggcaacgcctacacactggacataccatctagtatgcgcctccatccaacgttctacgtcggaaggctgaagccatacctgcagcacgagctacctagctcggttgaaccgaagcagaagactcggcggaagccatcgtcctctccagcacgacttcgcgctggagcagcgggtcgagctaatggtccagctcggccggaacgatcgaggcggtctgggaggccgccgcaaactgcgaatactttagagcgccgaacgcagtgctctggaactactccacgaccggaactcggtcgtggggagacgcgagatcagggtcgacaccaagttgaccacacacggggcgtgttcccaccaccaccaccgccaattcgtgacgcacacggctcaactcgatggatagttgagcggattgttggtcacagtatcccgagaacgaacaggcaaccggttcgttttcgtatccgttggagaggattccctcccaaccaagatacatgggagccgcggaacgtcttgctcgaaggcgtcccggacatggtgagggcgtacgaagcccaccatgcgctgcacactggaacgtaatgcgagcgctgctgttaacagcagcgcccgaagacacttcgagggcagacataggtacctgccccccgcggcagcgacgcgcttcgcacgttgccgcgcatgctactcagcagcagagaggtcctccgctgctgcgccagcggtcttcgacttcgactctcttcaacgtcacgcattgaccaagcggtcaatggtggttgacgtgccgggaccggcacgtctaaccttgacggggggatagtgtaacggggttacacgcacaagtggctacagtcacttgtaactctaacagacacgacgtctgttagaggttcgaaagactttctcgtccttggtgtagacacaccaaaggctacatacatttaggatcaccacgacgggtggtccatagagacttaggattcctattggttgagagcagcatcttttagccaatgagtgacatacatagcattggaattctgccctccagccgttggcagattcctattttagaatattacatttagaggaagtcagaaacataaaacaaaaatagcagttctcatcttttaccaaaacacgctacttggagtctttattttgtttgaagtatactcgtggatctcgagtatacttaactcaagtaaaagaaacctacgcttcctcatacacgtgcgcatacgtgtaagccgtagtagtgagcccattacagcaagtgcttctttcacagcctggaaggccgttctccacgacaaaattcaaagtactttaggtaagtgatccactgcttcggcctggaggtgatcatatatattccatatctgtatatttggcggattgcagaccgtctttgctgtatatttgcggtctattgggcctgtgtcgaactgaagaagttggcgacagggtagattgtttcctctctccgagaggtggtgcgcgtccccaagattgatcaagtgtcttggatttggaccagttgacttgtgttttggccttagccttgggcctagagaaagaagagagggcaaaggagtatttgtgtgattgtataacgtgtataactctatttgggttggattgttctagcgttagcccggcgtagctgtctgattcacggggtcgatactaacctcctggtgaaaagaaccgctacccaagggatacacatcgtgcgcctgaccaacagcgtgtactggacaacacacaccctgtgccagccaagacggatccaaagctctagtagcctgaggtctgtcaaggagggcctataactgttttctgggagaaaacaccgcatcgcctcgtcacagattcgattatctagagcgctgaactcgtaggtctctgtgctaacaaaagacaaacaaaacttcagtctacatagcgcagatatgttactcagtagaacgtggcatcgcaatgttaaagacccgtacctagcacccatgtcggcctctgttagtcgaggtttgatggagttggtgtggcgaacaatctcgccggcagcaagcgcacgctggaccgttgacagtgaaacctctatggccttcgcgatagcccgcattgtacgacgcttccgccatgggaacgcacttaaccgctctggaatgtcagtatgctgtttcttcctgccgcatttcccttgccttttgcatttgaaggagggcaacccaccacctgcccgacgatgctttaccgtcgctctccacgtgcgagatacagaactctcactgcaatcaaagcgctcagcagcctgtcgaacgaagtgttattgcaccatcaggtctacagagtgctctaggaaaaattcagcttgtatcaggggtcaggtctttgttggacttgcgttggcttgccgccatttctgaactgtgtcaatgctagttgggtggtgaccgatgctcggccttctcgccctaaaactgctcgctgctcgcgctaattcggtggacagcacactagcatctgctctgggtttctactcgtgtgctgattggctgatactagccaatataaatcagccaagaaaagtttgcaccaataatttgtgttggtcaagaaatgcaaaacagagttcacattgatctagccaagtaatctgaaacggagggagtacatcattcagtatatgtttgcaaatgcgtttgaatatcagccaacctcgaagagaattgtatcttaatcaactgtagatgggatgccgattcacaaggcgcgctacccgtgcagtaccttcccgctcagagatatcgtttaccaccactaattctcccttgagaatggtcagcgtgacactcaaggtcacctcgtgaaatcctcgggagttctgaggaatctttgttcatggtgatacttaggtgttggcttgggaaacactggagtttattatataaagtatggattcatgatccaaacccaggaaatcgtcttcaaatcctgcgtcacctgtcctcagagggatgaactctgggtttccgtgtggcactttgagcgctaagcctcctatgtcacagacttgcatgtattcaaatccaagtaattagcgggttaaagaacttcaaaatgcgcttcatggagtctaacgcgaaaacgtcaaccacagggttgcctcttccagttgccgacgtcgctacaagatttctcatatgttcaacaaatgatcgacaaacaatatcgagtgatatgtatgctagttagtttagaacatcgcaaggtctaatttaaaccgatatgatagcctaagttgtaagtctcgtgcgtccaattcatcaccaagctgtcgccccactgcataaagcttatgtcttcggtactgctgtttgcatcgtaaggacacaagtcatgtccatctgttcctgcaccagccggatatcgtggtcatcgacacgaaccaatgtttctagcagcaatcggatcattccagctgccatagagcccggttcttgttggaggatgttccttgtttgcgggggggcataccagtagatattaatcaatacgaaaaagagcaacaccaattccaattaataaaaagctaaaaaagaacaatgtaaagctcgacaactccagaagtagagcgttttccccgaacaccccctatacttgtccacctagcttgtccgagatgtaccggttgatcgccggggtactattttgacctgttagcggcagggatttgccatgcttgtataacttgtagatggtctagatggggtatgtagatctaccggtgtatacacctttgcccggccattgttggccttttccgcaaccaaagttgacataaattttggaggtagttgaagttgacaaaattctggttgaagtatcagattcatttcaagcaaattcgtctaatcttcaaccaatgttggcgcttacgtaaaacgttttgagctcgcccttgcgtcctgcagcacgactcctgttgctgtaggtgccgcaaaaagctttcatttcccaactcaccaccaagcctaaagatgccttctcaagcttcactcaaggcgcacagccccgaagagcgccgcagggtcctggacgcgtacaactccgggggtgactggcaggctgtcgcgcgccacaacggctttccgcggacgacagcgcagtacctggtgaactcgggccgcgtggagaacctcccgcgcggtggcgcgaggggggcgaaggtgacgccggcgatcaaggaggcgctcgagtcctacctgaacgagtgctgctcgtacactctgaacaccatgcaggacctcatcatggacgacttccaggtgcacctctctacctcgaccatctcccgccacctgctcgacatgctgtacaccgtgaagcaggtgagactcgcttgttacactgcattgtagatgacgatttataactaacgctgctgtacaataattgtcatcataggctcgtatcgagccgttcacgtgcaacagtcgggagaacaaggagaagaggaagcagttcgccgaggagctcgtcaaacaccacaacgagggcaacctcgtcgtgtattttgacgagactaactacaacttgtacgtcaagcgtactcgcgggcgcgccaagaagggagagcgcgccgtggagaagctgccgccctccaaaggggcgaacctgcagatacagtgcgctgtgttgtctgctatcggcgtcgttgcgtaccgaacgcatcgcagcagcaccaagatgcagaccaatgccaacttcatcgagaacctgtacgacgtcgtcacggagtcggacatgtacaagtccgagtatgcggacaagaaggtcgtgatcgtgtttgataacgcgccagcgcacaatcaaacggaggtgctcgtgaagccccgtgacgacctggtcctgctacgccttggaccctacagtccaatgtgtaaccctatcgagaactgtttcagtgtgctaaagtcgcacattaaacagtacctagcgctcatgcgcgaggagatgctgcagccagggttccagacggacgacgaaggcaagaagcttacgaagacggaggcgcgcatgcgtcttctggggcgcgcggcccacgtgtcgatgccctgcattacgcagcagttggtgctcaagatggagcttcacgcacgtgacttcgtcaatgcggcgctgcgcatggaggacatgcagtacgggatgtgacagggaacggtaagtgcgagtccccaggaagagtgccatctttggttgaggattaggcagctttgaatgaaatgaatttcatgatttgggaaatattttgttagcttcaactacctcaaaatttgtgtcaactttggttgcggaaaaggccaacaatggccgggcaaaggtgtagccgtacaagttagcatataaacatcgaataaaagaagtacgatcaatatctccgtctctgtgtcgatgcacaccttccactttggcacaccttcctgaacatgcttcaccgaacgtacagtaatgctcgcgtcacagtccgtgtgccgctggtcgtttttccgaaagccttcacctcatgaggcctgtttagttccgtgagtgcgccgcatcatattaagggtgaagctacctgggggcctttagacacctgccgccgtcacaacagttgactgcttttcctcactcctatctttggcactggagaagtattagcactttgaaccggcttacacataggcgctcaaactttttttcttgtgatagagctactgtgcggctggtacttgacgatcgggcaccaacttcttccccggtcgcaacgtataaaccgctggatatattcttcgaaaagctttttctttaatataccgacacagtaccaaaaaattgttcagcaaatgcatttcgtgtcctatttttgtcattacaatctgacacctttgtcatattgaacgaaaaaatggcgaaaataccgacttttgggggcgaggggttgtcatccacggtagttcatgtagtggtcgacgaaggtcaccatgtacctattgccattccggtctacgggagttatcggccccttaaggtagatgcatatgaccccgccagtcctgtcgatgagcggggtctgcccgagtctttcttcggctatgcgttcctcatctattgcccttggcgcacatcaaaaacgaccctcgtcctatccgtcagctcaataccgaatcccggcgtttcggcaatcgttttcgaccgttcccagcatgacatgacagagtcaattatgcagctccactaacgtgcgcttgacaacactggcctgcccaccgtcactatctgcttggtcgagtgcagcaaaaaccctgttgcttctctccttgcgtgaactcgcgttgcttgcgatggtcgttcccactgcgcaggccgtgctcgccaccaggacgtcgctctccttgcacatctcgatcaggtgtccgaggccctcgacagttttccttgtaaatcatcatgatgtccttctcttcgattccgtgcgagaccctgtgtgtagtaagcattgcggataacctcatcgtactctctactatctaaagtagcatgcagcaccatgccgctcttcttcgtggcggagagcgtctggccgtccgcgaccctgtcaactccactgtcgagaacgtatgtcgtgccgcagccgtccctcacggccaaagcgaacattgcttggccggagctgctcagccctggagagttttttatgtacccgtacttgcgggtcgaacactcctttttattccccttcacaacgacatttgtcatcatgttgccatcgcgtccagcaccatgcgtgctacggttgttggggttctcgccaaagtggctgcccccgtccagctcgaacgtgctggcaatgtcgtccagcacccatgcctgcctttggtggtccgcacgtcgcctatccatgcgcatcgggaccatcctttttatgttgagcggggtgcagtcacagatgaactgcaggtccaagcggtcggcagctcttgtcactgcacatcagatacagatactgttctgtccagctgctgttgggtctcttcctggccttcatcaaccaagaggtctgctcaatcgtgatctccttcgcgtacacctccagccttctgttcatcatgtgctcgagtgtgggtgcctccaccgcccagaatgccttcatcctgtcgaagcacttccgcgctgggccctccaggtagcggttcagtacccgcactttaaacttatccagccggttgcccccgctgatcacctgagcagccaccagctcgtccaagaaccggaggccccaatccctgaagcccgccccgagtccttcgtactccgatttgccggagaagctctcgagcggaggggattcatgtccttaagcgccggcacattcaaccccgagttctgtggcggcgctaactgctactggtatgccggcggctgcggcgggtgtggcagttgctgcagcgcctgagagaacggacctgatgcgctggcgcgtaagccggcccctggaaggcccctggtccattcgcctaaatgctcactaccgtttttttattattcacagtttaataagacagactgcatgtacttattggttgggtatggtaatagtaaacgcaattgtatttaggggtgctaatcgggcaacatgcaaagtggctaaactgcttgagatcatagtgatatagaaaatatatgcaagaatgaagggcattgagagcagtaaacaatgcgataatactctttttatggttatgttcataagtctaccaaagagtacagagctactcacctaaggagcttcgaacaacaatgctacatagcagtcacagcggggccggcgtcgacatctttagagaggccagagtctcaacagtccctatctaatgagttgacataatattgcatcatacacgtgctcatatcagttaccacaatagccatgcactgtccaccttgatagctctgtagaatcgccggggttgctggtgatgctattgagggcattcacccagcccgcactgcacccatataatttagtccccatttttgtcaaccatcgaactgagcaccgtgtctgcacgaacaaacttaaccaataagtagtcccttgtcgtcggtttcaactacagtacgcttgtagctttcagcactgagtatacgagaatacaatagtccgataaatactgctcaactgagggcaaaagttaatcaatgtattagtgtcattggttgatgccaattcatgtgcccgcacctgctctacctccataagtcgcggttgtactgcggtcacaacagcatatcgggcgggggagagactttccagctcgaccgtgagcaccagcattgctgatgttaaaagctctcacgtttagtagacaccggtgggacataaaaaatgtccatgtattgcgtgtgccttggtgcctttctcgtcttgaataccatcccacgctggtggtctttcaaggacggtcgatctaaattcgatacatgtcaatcccgtcgcagctgtcaacgcctccccgcgctgaagcttgacgagaactagtactaaatgcgaataattgacgttgcgaccagtcgcgacgtgagtgcagagtactctttcacaacctggccgaacagatgtcacacagcagacaaagttagcatagacttctgcagctctttcgtgacggccctgaacttatcaaaggtctttaccaccgccttgactcactcgtgctcagaacgctgcagtataagctgctgtagttcttactcaacacgaaggttatgccccaacttgattatggcgggttagagcttcggatagcgcgccactttatcgtatgtgctagtctagcaattgtcgtttcgtaacagaggcgacagaagggagacacggcgtagcaaaccgagcgccccttatgtgttatcagcttggatgtcaccgcgtgcacctttgcaatgagctcctcctcggtcttgagaaagtccttcaccgtcaaattcaatctgtacctagcacatccaacggagggaataaccccttctttccagagtggctgaagtgcaccgaatggccgtcctggcagtaggagggtcgtcgggcggacagagtcgttgtgccgcccaagtcgctccggcgcgagccaaagaggcggaacacgcagcggacgagctcacggtcgggttgtggaggctgagcgcgccgtgcgcgaggcggcatgtgtggaaagagcgtgcgatcggtttgggccgtgcggaggcatgcacgcgagttttggtgtgcggattgtgcgtaacggaggcgcgatgggtggttgacgattgcggtacggcggagagtgcgtggtagcgtgtggtgcgtccgtaaagtggattttgttgacgggtgggagatgagtgaagtatccggggatgtagctcaaatggtagagcgctcgcttagcatgcgagaggtacagggatcgacaccctgcttctccagacgtgtgtagtatagtggtcagtacctcaccttgtggcggtgaaatccctggttcgaatccgggcacgcgcactcttatgctcattatgctgcttttacgtgcgcgttatggacgctgcgccgcccctagccgtcgccatgcacacccgccacgctctcggtccccaattaccgctttttgtcgcctttcagcctaccggcgtgagcggtcccggccgctctccttttatcgccctcacgacgacactgctgcggtgcgactcgatggcattgtcttgtggctcggtctagtaacgtagtggagctgtagtacctcccgcgtcgtcggagctcaccaggccaccggagagagtggatgaagcgccccgaatggccgtcctggcagtaggagggtcgtccggcggacagtcgttgtgccgtccaagtcgctccggcgcgagccaaagaggcggaacacgcagcggacgagctcacggtcgggttgtggaggctgagcgcgccgtgcgcgaggcggcatgtgtggaaagagcgtgcgatcggtttgggccgtgcggaggcatgcacgcgagttttggtgtgcggattgtgcgtaacggaggcgcgatgggtggttgacgattgcggtacggcggagagtgcgtggtagcgtgtggtgcgtccgtaaagtggattttgttgacgggtgggagatgagtgaagtatccggggatgtagctcaaatggtagagcgctcgcttagcatgcgagaggtacagggatcgataccctgcttctccaggcgtgtgtagtatagtggtcagtacctcaccttgtggcggtgaaatccctggttcgaatccgggcacgcgcactcttatgctcattatgctgcttttacgtgcgcgttatggacgctgcgccgcccctagccgtcgccatgcacacccgccacgctctcggtccccaattaccgctttttgtcgcctttcagcctaccggcgtgagcggtcccggccgctctccttttatcgccctcacgacgacactgctgcggtgcgactcgatggcattgtcttggggctcggtctagtaacgtagtggagctgtagtacctcccgcgtcgtcggagctcaccaggccaccggagagagtggatgaagcgccccgaatggccgtcctggcagtaggagggtcgtccggcggacagtcgttgtgccgtccaagtcgctccggcgcgagccaaagaggcggaacacgcagcggacgagctcacggtcgagttgtggaggctgagcgcgccgtgcgcgaggcggcatgtgtggaaagagcgtgcgatcggtttgggccgtgcggaggcatgtacgcgagttttggtgtgcggattgtgcgtaacggaggcgcgatgggtggttgacgattgcggtacggcggagagtgcgtggtagcgtgtggtgcgtccgtaaagtggattttgttgacgggtgggagatgagtgaagtatccggggatgtagctcaaatggtagagcgctcgcttagcatgcgagaggtacagggatcgacaccctgcttctccaggcgtgtgtagtatagtggtcagtacctcaccttgtggcggtgaaatccctggttcgaatccgggcacgcgcactcttatgctcattatgctgcttttacgtgcgcgttatggacgctgcgccgcccctagccgtcgccatgcacacccgccacgctctcggtccccaattaccgctttttgtcgcctttcagcctaccggcgtgagcggtcccggccgctctccttttatcgccctcacgacgacactgctgcggtgcgactcgatggcattgtcttgtggctcggtctagtaacgtagtggagctgtagtacctcccgcgtcgtcggagctcaccaggccaccggagagagtggatgaagcgccccgaatggccgtcctggcagtaggagggtcgtccggcggacagtcgttgtgccgtccaagtcgctccggcgcgagccaaagaggcggaacacgcagcggacgagctcacggtcgggttgtggaggctgagcgcgccgtgcgcgaggcggcatgtgtggaaagagcgtgcgatcggtttgggccgtgcggaggcatgtacgcgagttttggtgtgcggattgtgcgtaacggaggcgcgatgggtggttgacgattgcggtacggcggagagtgcgtggtagcgtgtggtgcgtccgtaaagtggattttgttgacgggtgggagacgagtaaagtatccggggatgtagctcaaatggtagagcgctcgcttagcatgcgagaggtacagggatcgataccctgcttctccaggcgtgtgtagtatagtggtcagtacctcaccttgtggcggtgaaatccctggttcgaatccgggcacgcgcactcttatgctcattatgctgcttttacgtgcgcgttatggacgctgcgccgcccctagccgtcgccatgcacacccgccacgctctcggtccccaattaccgctttttgtcgccgttcagcctaccggcgtgagcggtcccggccgctctccttttatcgccctcacgacgacactgctgcggtgcgactcgatggcattgtcttggggctcggtctagtaacgtagtggagctgtagtacctcccgcgtcgtcggagctcaccaggccaccggagagaggggatgaagcgccccgaatggccgtcctggcagtaggagggtcgtcgggcggacagagtcgttgtgccgtccaagtcgctccggcgcgagccaaagaggcggaacacgcagcggacgagctcacggtcgggttgtggaggctgagcgcgccgtgcgcgaggcggcatgtgtggaaagagcgtgcgatcggtttgggccgtgcggaggcatgcacgcgagttttggtgtgcggattgtgcgtaacggaggcgcgatgggtggttgacgattgcggtacggcggagagtgcgtggtagcgtgtggtgcgtccgtaaagtggattttgttgacgggtgggagatgagtgaagtatccggggatgtagctcaaatggtagagcgctcgcttagcatgcgagaggtacagggatcgacaccctgcttctccaggcgtgtgtagtatagtggtcagtacctcaccttgtggcggtgaaatccctggttcgaatccgggcacgcgcactcttatgctcattatgctgcttttacgtgcgcgttatggacgctgcgccgcccctagccgtcgccatgcacacccgccacgctctcggtccccaattaccgctttttgtcgcctttcagcctaccggcgtgagcggtcccggccgctctccttttatcgccctcacgacgacactgctgcggtgcgactcgatggcattgtcttggggctcggtctagtaacgtagtggagctgtagtacctcccgcgtcgtcggagctcaccaggccaccggagagagtggatgaagcgccccgaatggccgtcctggcagtaggagggtcgtccggcggacagtcgttgtgccgtccaagtcgctccggcgcgagccaaagaggcggaacacgcagcggacgagctcacggtcgggttgtggaggctgagcgcgccgtgcgcaaggcggcatgtgtggaaagagcgtgcgatcggtttgggccgtgcggaggcatgtacgcgagttttggtgtgcggattgtgcgtaacggaggcgcgatgggtggttgacgattgcggtacggcggagagtgcgtggtagcgtgtggtgcgtccgtaaagtggattttgttgacgggtgggagatgagtgaagtatccggggatgtagctcaaatggtagagcgctcgcttagcatgcgagaggtacagggatcgacaccctgcttctccaggcgtgtgtagtatagtggtcagtacctcaccttgtggcggtgaaatccctggttcgattccgggcacgcgcactcttatgctcattatgctgcttttacgtgcgcgttatggacgctgcgccgcccctagccgtcgccatgcacacccgccacgctctcggtccccaattaccgctttttgtcgcctttcagcctaccggcgtgagcggtcccggccgctctccttttatcgccctcacgacgacactgctgcggtgcgactcgatggcattgtcttggggctcggtctagtaacgtagtggagctgtagtacctcccgcgtcgtcggagctcaccaggccaccggagagaggggatgaagcgccccgaatggccgtcctggcagtaggagggtcgtcgggcggacagagtcgttgtgccgtccaagtcgctccggcgcgagccaaagaggcggaacacgcagcggacgagctcacggtcgggttgtggaggctgagcgcgccgtgcgcgaggcggcatgtgtggaaagagcgtgcgatcggtttgggccgtgcggaggcatgtacgcgagttttggtgtgcggattgtgcgtaacggaggcgcgatgggtggttgacgattgcggtacggcggagagtgcgtggtagcgtgtggtgcgtccgtaaagtggattttgttgacgggtgggagatgagtgaagtatccggggatgtagctcaaatggtagagcgctcgcttagcatgcgagaggtacagggatcgataccctgcttctccaggcgtgtgtagtatagtggtcagtacctcaccttgtggcggtgaaatccctggttcgaatccgggcacgcgcactcttatgctcattatgctgcttttacgtgcgcgttatggacgctgcgccgcccctagccgtcgccatgcacacccgccacgctctcggtccccaattaccgctttttgtcgcctttcagcctaccggcgtgagcggtcccggccgctctccttttatcgccctcacgacgacactgctgcggtgcgactcgatggcattgtcttggggctcggtctagtaacgtagtggagctgtagtacctcccgcgtcgtcggagctcaccaggccaccggagagagtggatgaagcgccccgaatggccgtcctggcagtaggagggtacagtcgttgtgccgtccaagtcgctccggcgcgagccaaagaggcggaacacgcagcggacgagctcacggtcgggttgtggaggctgagcgcgccgtgcgcgaggcggcatgtgtggaaagagcgtgcgatcggtttgggccgtgcggaggcatgtacgcgagttttggtgtgcggattgtgcgtaacggaggcgcgatgggtggttgacgattgcggtacggcggagagtgcgtggtagcgtgtggtgcgtccgtaaagtggattttgttgacgggtgggagatgagtgaagtatccggggatgtagctcaaatggtagagcgctcgcttagcatgcgagaggtacagggatcgataccctgcttctccaggcgtgtgtagtatagtggtcagtacctcaccttgtggcggtgaaatccctggttcgaatccgggcacgcgcactcttatgctcattatgctgcttttacgtgcgcgttatggacgctgcgccgcccctagccgtcgccatgcacacccgccacgctctcggtccccaattaccgctttttgtcgcctttcagcctaccggcgtgagtggtcccggccgctctcctcttgtcgccctcacgacgacactgctgcggtgcgactcgatggcattgtcttgtggctcggtctagtaacgtagtggagctgtagtacctcccgcgtcgttggagctcaccaggccaccggagagagtggatgaagcgccccgaatggccgtcctggcagtaggagggtcgtcgggcggacagagtcgttgtgccgtccaagtcgctccggcgcgagccaaagaggcggaacacgcagcggacgagctcacggtcgggttgtggaggctgagcgcgccgtgcgcgaggcggcatgtgtggaaagagcgtgcgatcggtttgggccgtgtggaggcatgtacgcgagttttggtgtgcggattgtgcgtaacggaggcgcgatggtggttgacgattgcggtacggcggagagtgcgtggtagcgtgtggtgcgtccgtaaagtggattttgttgacgggtgggagatgagtaaagtatccggggatgtagctcaaatggtagagcgctcgcttagcatgcgagaggtacagggatcgataccctgcttctccaggcgtgtgtagtatagtggtcagtacctcaccttgtggcggtgaaatccctggttcgaatccgggcacgcgcactcttatgctcattatgctgcttttacgtgcgcgttatggacgctgcgccgcccctagccgtcgccatgcacacccgccacgctctcggtccccaattaccgctttttgtcgcctttcagcctaccggcgtgagcggtcccggccgctctcctcttgtcgccctcacgacgacactgctgcggtgcgactcgatggcattgtcttgtggctcggtctagtaacgtagtggagctgtagtacctcccgcgtcgtcggagctcaccaggccaccggagagagtggatgaagcgccccgaatggccgtcctggcagtaggagggtcgtccggcggacagtcgttgtgccgtccaagtcgctccggcgcgagccaaagaggcggaacacgcagcggacgagctcacggtcgggttgtggaggctgagcgcgccgtgcgcgaggcggcatgtgtggaaagagcgtgcgatcggtttgggccgtgcggaggcatgtacgcgagttttggtgtgcggattgtgcgtaacggaggcgcgatgggtggttgacgattgcggtacggcggagagtgcgtggtagcgtgtggtgcgtccgtaaagtggattttgttgacgggtgggagacgagtgaagtatccggggatgtagctcaaatggtagagcgctcgcttagcatgcgagaggtacagggatcgataccctgcttctccaggcgtgtgtagtatagtggtcagtacctcaccttgtggcggtgaaatccctggttcgaatccgggcacgcgcactcttatgctcattatgctgcttttacgtgcgcgttatggacgctgcgccgcccctagccgtcgccatgcacacccgccacgctctcggtccccaattaccgctttttgtcgcctttcagcctaccggcgtgagcggtcccggccgctctcctcttgtcgccctcacgacgacactgctgcggtgcgactcgatggcattgtcttgtggctcggtctagtaacgtagtggagctgtagtacctcccgcgtcgtcggagctcaccaggccaccggagagagtggatgaagcgccccgaatggccgtcctggcagtaggagggtcgtcgggcggacagtcgttgtgccgtccaagtcgctccggcgcgagccaaagaggcggaacacgcagcggacgagctcacggtcgggttgtggaggctgagcgcgccgtgcgcgaggcggcatgtcgtgcgatcggtttgggccgtgcggaggcatgtacgcgagttttggtgtgcggattgtgcgtaacggaggcgcgatgggtggttgacgattgcggtacggcggagagtgcgtggtagcgtgtggtgcgtccgtaaagtggattttgttgacgggtgggagacgagtaaagtatccggggatgtagctcaaatggtagagcgctcgcttagcatgcgagaggtacagggatcgacaccctgcttctccaggcgtgtgtagtatagtggtcagtacctcaccttgtggcggtgaaatccctggttcgaatccgggcacgcgcactcttatgctcattatgctgcttttacgtgcgcgttatggacgctgcgccgcccctagccgtcgccatgcacacccgccacgctctcggtccccaattaccgctttttgtcgcctttcagcctaccggcgtgagcggtcccggccgctctccttttatcgccctcacgacgacactgctgcggtgcgactcgatggcattgtcttggggctcggtctagtaacgtagtggagctgtagtacctcccgcgtcgtcggagctcaccaggccaccggagagagtggatgaagcgccccgaatggccgtcctggcagtaggagggtcgtcgggcggacagagtcgttgtgccgtccaagtcgctccggcgcgagccaaagaggcggaacacgcagcggacgagctcacggtcgggttgtggaggctgagcgcgccgtgcgcgaggcggcatgtgtggaaagagcgtgcgatcggtttgggccgtgcggaggcatgtacgcgagttttggtgtgcggattgtgcgtaacggaggcgcgatgggtggttgacgattgcggtacggcggagagtgcgtggtagcgtgtggtgcgtccgtaaagtggattttgttgacgggtgggagatgagtgaagtatccggggatgtagctcaaatggtagagcgctcgcttagcatgcgagaggtacagggatcgataccctgcttctccaggcgtgtgtagtatagtggtcagtacctcaccttgtggcggtgaaatccctggttcgaatccgggcacgcgcactcttatgctcattatgctgcttttacgtgcgcgttatggacgctgcgccgcccctagccgtcgccatgcacacccgccacgctctcggtccccaattaccgctttttgtcgcctttcagcctaccggcgtgagtggtcccggccgctctcctcttgtcgccctcacgacgacactgctgcggtgcgactcgatggcattgtcttgtggctcggtctagtaacgaagtggagctgtagtacctcccgcgtcgttggagctcaccaggccaccggagagagtggatgaagcgccccgaatggccgtcctggcagtaggagggtcgtcgggcggacagagtcgttgtgccgtccaagtcgctccggcgcgagccaaagaggcggaacacgcagcggacgagctcacggtcgggttgtggaggctgagcgcgccgtgcgcgaggcggcatgtgtggaaagagcgtgcgatcggtttgggccgtgcggaggcatgtacgcgagttttggtgtgcggattgtgcgtaacggaggcgcgatgggtggttgacgattgcggtacggcggagagtgcgtggtagcgtgtggtgcgtccgtaaagtggattttgttgacgggtgggagacgagtaaagtatccggggatgtagctcaaatggtagagcgctcgcttagcatgcgagaggtacagggatcgataccctgcttctccaggcgtgtgtagtatagtggtcagtacctcaccttgtggcggtgaaatccctggttcgaatccgggcacgcgcactcttatgctcattatgctgcttttacgtgcgcgttatggacgctgcgccgcccctagccgtcgccatgcacacccgccacgctctcggtccccaattaccgctttttgtcgcctttcagcctaccggcgtgagtggtcccggccgctctcctcttgtcgccctcacgacgacactgctgcggtgcgactcgatggcattgtcttgtggctcggtctagtaacgtagtggagctgtagtacctcccgcgtcgttggagctcaccaggccaccggagagagtggatgaagcgccccgaatggccgtcctggcagtaggagggtcgtcgggcggacagagtcgttgtgccgtccaagtcgctccggcgcgagccaaagaggcggaacacgcagcggacgagctcacggtcgggttgtggaggctgagcgcgccgtgcgcgaggcggcatgtgtggaaagagcgtgcgatcggtttgggccgtgcggaggcatgtacgcgagttttggtgtgcggattgtgcgtaacggaggcgcgatgggtggttgacgattgcggtacggcggagagtgcgtggtagcgtgtggtgcgtccgtaaagtggattttgttgacgggtgggagatgagtgaagtatccggggatgtagctcaaatggtagagcgctcgcttagcatgcgagaggtacagggatcgataccctgcttctccaggcgtgtgtagtatagtggtcagtacctcaccttgtggcggtgaaatccctggttcgaatccgggcacgcgcactcttatgctcattatgctgcttttacgtgcgcgttatggacgctgcgccgcccctagccgtcgccatgcacacccgccacgctctcggtccccaattaccgctttttgtcgcctttcagcctaccggcgtgagtggtcccggccgctctcctcttgtcgccctcacgacgacactgctgcggtgcgactcgatggcattgtcttgtggctcggtctagtaacgtagtggagctgtagtacctcccgcgtcgttggagctcaccaggccaccggagagagtggatgaagcgccccgaatggccgtcctggcagtaggagggtcgtcgggcggacagagtcgttgtgccgtccaagtcgctccggcgcgagccaaagaggcggaacacgcagcggacgagctcacggtcgggttgtggaggctgagcgcgccgtgcgcgaggcggcatgtgtggaaagagcgtgcgatcggtttgggccgtgcggaggcatgtacgcgagttttggtgtgcggattgtgcgtaacggaggcgcgatgggtggttgacgattgcggtacggcggagagtgcgtggtagcgtgtggtgcgtccgtaaagtggattttgttgacgggtgggagacgagtaaagtatccggggatgtagctcaaatggtagagcgctcgcttagcatgcgagaggtatagggatcgataccctgcttctccaggcgtgtgtagtatagtggtcagtacctcaccttgtggcggtgaaatccctggttcgaatccgggcacgcgcactcttatgctcattatgctgcttttacgtgcgcgttatggacgctgcgccgcccctagccgtcgccatgcacacccgccacgctctcggtccccaattaccgctttttgtcgcctttcagcctaccggcgtgagtggtcccggccgctctcctcttgtcgccctcacgacgacactgctgcggtgcgactcgatggcattgtcttgtggctcggtctagtaacgtagtggagctgtagtacctcccgcgtcgtcggagctcaccaggccaccggagagagtggatgaagcgccccgaatggccgtcctggcagtaggagggtcgtcgggcggacagagtcgttgtgccgtccaagtcgctccggcgcgagccaaagaggcggaacacgcagcggacgagctcacggtcgggttgtggaggctgagcgcgccgtgcgcgaggcggcatgtgtggaaagagcgtgcgatcggtttgggccgtgtggaggcatgtacgcgagttttggtgtgcggattgtgcgtaacggaggcgcgatggtggttgacgattgcggtacggcggagagtgcgtggtagcgtgtggtgcgtccgtaaagtggattttgttgacgggtgggagatgagtaaagtatccggggatgtagctcaaatggtagagcgctcgcttagcatgcgagaggtacagggatcgataccctgcttctccaggcgtgtgtagtatagtggtcagtacctcaccttgtggcggtgaaatccctggttcgaatccgggcacgcgcactcttatgctcattatgctgcttttacgtgcgcgttatggacgctgcgccgcccctagccgtcgccatgcacacccgccacgctctcggtccccaattaccgctttttgtcgcctttcagcctaccggcgtgagtggtcccggccgctctcctcttgtcgccctcacgacgacactgctgcggtgcgactcgatggcattgtcttgtggctcggtctagtaacgtagtggagctgtagtacctcccgcgtcgttggagctcaccaggccaccggagagagtggatgaagcgccccgaatggccgtcctggcagtaggagggtcgtcgggcggacagagtcgttgtgccgtccaagtcgctccggcgcgagccaaagaggcggaacacgcagcggacgagctcacggtcgagttgtggaggctgagcgcgccgtgcgcgaggcggcatgtgtggaaagagcgtgcgatcggtttgggccgtgcggaggcatgcacgcgagttttggtgtgcggattgtgcgtaacggaggcgcgatgggtggttgacgattgcggtacggcggagagtgcgtggtagcgtgtggtgcgtccgtaaagtggattttgttgacgggtgggagatgagtgaagtatccggggatgtagctcaaatggtagagcgctcgcttagcatgcgagaggtacagggatcgataccctgcttctccaggcgtgtgtagtatagtggtcagtacctcaccttgtggcggtgaaatccctggttcgaatccgggcacgcgcactcttatgctcattatgctgcttttacgtgcgcgttatggacgctgcgccgcccctagccgtcgccatgcacacccgccacgctctcggtccccaattaccgctttttgtcgcctttcagcctaccggcgtgagcggtcccggccgctctccttttatcgccctcacgacgacactgctgcggtgcgactcgatggcattgtcttggggctcggtctagtaacgtagtggagctgtagtacctcccgcgtcgtcggagctcaccaggccaccggagagaggggatgaagcgccccgaatggccgtcctggcagtaggagggtcgtcgggcggacagagtcgttgtgccgcccaagtcgctccggcgcgagccaaagaggcggaacacgcagcggacgagctcacggtcgggttgtggaggctgagcgcgccgtgcgcaaggcggcatgtgtggaaagagcgtgcgatcggtttgggccgtgcggaggcatgtacgcgagttttggtgtgcggattgtgcgtaacggaggcgcgatgggtggttgacgattgcggtacggcggagagtgcgtggtagcgtgtggtgcgtccgtaaagtggattttgttgacgggtgggagatgagtgaagtatccggggatgtagctcaaatggtagagcgctcgcttagcatgcgagaggtacagggatcgacaccctgcttctccaggcgtgtgtagtatagtggtcagtacctcaccttgtggcggtgaaatccctggttcgaatccgggcacgcgcactcttatgctcattatgctgcttttacgtgcgcgttatggacgctgcgccgcccctagccgtcgccatgcacacccgccacgctctcggtccccaattaccgctttttgtcgcctttcagcctaccggcgtgagcggtcccggccgctctccttttatcgccctcacgacgacactgctgcggtgcgactcgatggcattgtcttggggctcggtctagtaacgtagtggagcggtagtacctcccgcgtcgtcggagctcaccaggccaccggagagagtggatgaagcgccccgaatggccgtcctggcagtaggagggtcgtcgggcggagccgtccaagtcgctccggcgcgagccaaagaggcggaacacgcagcggacgagctcacggtcgagttgtggaggctgagcgcgccgtgcgcgaggcggcatgtgtggaaagagcgtgcgatcggtttgggccgtgcggaggcatgcacgcgagttttggtgtgcggattgtgcgtaacggaggcgcgatgggtggttgacgattgcggtacggcggagagtgcgtggtagcgtgtggtgcgtccgtaaagtggattttgttgacgggtgggagatgagtgaagtatccggggatgtagctcaaatggtagagcgctcgcttagcatgcgagaggtacagggatcgataccctgcttctccaggcgtgtgtagtatagtggtcagtacctcaccttgtggcggtgaaatccctggttcgaatccgggcacgcgcactcttatgctcattatgctgcttttacgtgcgcgttatggacgctgcgccgcccctagccgtcgccatgcacacccgccacgctctcggtccccaattaccgctttttgtcgcctttcagcctaccggcgtgagcggtcccggccgctctccttttatcgccctcacgacgacactgctgcggtgcgactcgatggcattgtcttgtggctcggtctagtaacgtagtggagctgtagtacctcccgcgtcgtcggagctcaccaggccaccggagagagtggatgaagcgccccgaatggccgtcctggcagtaggagggtcgtcgggcggacagagtcgttgtgccgtccaagtcgctccggcgcgagccaaagaggcggaacacgcagcggacgagctcacggtcgagttgtggaggctgagcgcgccgtgcgcgaggcggcatgtgtggaaagagcgtgcgatcggtttgggccgtgcggaggcatgcacgcgagttttggtgtgcggattgtgcgtaacggaggcgcgatgggtggttgacgattgcggtacggcggagagtgcgtggtagcgtgtggtgcgtccgtaaagtggattttgttgacgggtgggagatgagtgaagtatccggggatgtagctcaaatggtagagcgctcgcttagcatgcgagaggtacagggatcgataccctgcttctccaggcgtgtgtagtatagtggtcagtacctcaccttgtggcggtgaaatccctggttcgaatccgggcacgcgcactcttatgctcattatgctgcttttacgtgcgcgttatggacgctgcgccgcccctagccgtcgccatgcacacccgccacgctctcggtccccaattaccgctttttgtcgcctttcagcctaccggcgtgagcggtcccggccgctctccttttatcgccctcacgacgacactgctgcggtgcgactcgatggcattgtcttggggctcggtctagtaacgtagtggagctgtagtacctcccgcgtcgtcggagctcaccaggccaccggagagagtggatgaagcgccccgaatggccgtcctggcagtaggagggtcgtcgggcggagccgtccaagtcgctccggcgcgagccaaagaggcggaacacgcagcggacgagctcacggtcgggttgtggaggctgagcgcgccgtgcgcgaggcggcatgtgtggaaagagcgtgcgatcggtttgggccgtgcggaggcatgtacgcgagttttggtgtgcggattgtgcgtaacggaggcgcgatgggtggttgacgattgcggtacggcggagagtgcgtggtagcgtgtggtgcgtccgtaaagtggattttgttgacgggtgggagacgagtaaagtatccggggatgtagctcaaatggtagagcgctcgcttagcatgcgagaggtacagggatcgataccctgcttctccaggcgtgtgtagtatagtggtcagtacctcaccttgtggcggtgaaatccctggttcgaatccgggcacgcgcactcttatgctcattatgctgcttttacgtgcgcgttatggacgctgcgccgcccctagccgtcgccatgcacacccgccacgctctcggtccccaattaccgctttttgtcgcctttcagcctaccggcgtgagcggtcccggccgctctccttttatcgccctcacgacgacactgctgcggtgcgactcgatggcattgtcttggggctcggtctagtaacgtagtggagctgtagtacctcccgcgtcgtcggagctcaccaggccaccggagagagtggatgaagcgccccgaatggccgtcctggcagtaggagggtcgtcgggcggagccgtccaagtcgctccggcgcgagccaaagaggcggaacacgcagcggacgagctcacggtcgagttgtggaggctgagcgcgccgtgcgcgaggcggcatgtgtggaaagagcgtgcgatcggtttgggccgtgcggaggcatgcacgcgagttttggtgtgcggattgtgcgtaacggaggcgcgatgggtggttgacgattgcggtacggcggagagtgcgtggtagcgtgtggtgcgtccgtaaagtggattttgttgacgggtgggagatgagtgaagtatccggggatgtagctcaaatggtagagcgctcgcttagcatgcgagaggtacagggatcgacaccctgcttctccaggcgtgtgtagtatagtggtcagtacctcaccttgtggcggtgaaatccctggttcgaatccgggcacgcgcactcttatgctcattatgctgcttttacgtgcgcgttatggacgctgcgccgcccctagccgtcgccatgcacacccgccacgctctcggtccccaattaccgctttttgtcgcctttcagcctaccggcgtgagcggtcccggccgctctccttttatcgccctcacgacgacactgctgcggtgcgactcgatggcattgtcttggggctcggtctagtaacgtagtggagctgtagtacctcccgcgtcgtcggagctcaccaggccaccggagagagtggatgaagcgccccgaatggccgtcctggcagtaggagggtcgtcgggcggagccgtccaagtcgctccggcgcgagccaaagaggcggaacacgcagcggacgagctcacggtcgagttgtggaggctgagcgcgccgtgcgcgaggcggcatgtgtggaaagagcgtgcgatcggtttgggccgtgcggaggcatgcacgcgagttttggtgtgcggattgtgcgtaacggaggcgcgatgggtggttgacgattgcggtacggcggagagtgcgtggtagcgtgtggtgcgtccgtaaagtggattttgttgacgggtgggagatgagtgaagtatccggggatgtagctcaaatggtagagcgctcgcttagcatgcgagaggtacagggatcgataccctgcttctccaggcgtgtgtagtatagtggtcagtacctcaccttgtggcggtgaaatccctggttcgaatccgggcacgcgcactcttatgctcattatgctgcttttacgtgcgcgttatggacgctgcgccgcccctagccgtcgccatgcacacccgccacgctctcggtccccaattaccgctttttgtcgcctttcagcctaccggcgtgagcggtcccggccgctctccttttatcgccctcacgacgacactgctgcggtgcgactcgatggcattgtcttggggctcggtctagtaacgtagtggagctgtagtacctcccgcgtcgtcggagctcaccaggccaccggagagaggggatgaagcgccccgaatggccgtcctggcagtaggagggtcgtcgggcggacagtcgttgtgccgtccaagtcgctccggcgcgagccaaagaggcggaacacgcagcggacgagctcacggtcgggttgtggaggctgagcgcgccgtgcgcgaggcggcatgtgtggaaagagcgtgcgatcggtttgggccgtgcggaggcatgtacgcgagttttggtgtgcggattgtgcgtaacggaggcgcgatgggtggttgacgattgcggtacggcggagagtgcgtggtagcgtgtggtgcgtccgtaaagtggattttgttgacgggtgggagacgagtaaagtatccggggatgtagctcaaatggtagagcgctcgcttagcatgcgagaggtacagggatcgataccctgcttctccaggcgtgtgtagtatagtggtcagtacctcaccttgtggcggtgaaatccctggttcgaatccgggcacgcgcactcttatgctcattatgctgcttttacgtgcgcgttatggacgctgcgccgcccctagccgtcgccatgcacacccgccacgctctcggtccccaattaccgctttttgtcgcctttcagcctaccggcgtgagcggtcccggccgctctccttttatcgccctcacgacgacactgctgcggtgcgactcgatggcattgtcttggggctcggtctagtaacgtagtggagctgtagtacctcccgcgtcgtcggagctcaccaggccaccggagagaggggatgaagcgccccgaatggccgtcctggcagtaggagggtcgtcgggcggacagagtcgttgtgccgtccaagtcgctccggcgcgagccaaagaggcggaacacgcagcggacgagctcacggtcgggttgtggaggctgagcgcgccgtgcgcgaggcggcatgtgtggaaagagcgtgcgatcggtttgggccgtgcggaggcatgtacgcgagttttggtgtgcggattgtgcgtaacggaggcgcgatgggtggttgacgattgcggtacggcggagagtgcgtggtagcgtgtggtgcgtccgtaaagtggattttgttgacgggtgggagacgagtaaagtatccggggatgtagctcaaatggtagagcgctcgcttagcatgcgagaggtacagggatcgacaccctgcttctccaggcgtgtgtagtatagtggtcagtacctcaccttgtggcggtgaaatccctggttcgaatccgggcacgcgcactcttatgctcattatgctgcttttacgtgcgcgttatggacgctgcgccgcccctagccgtcgccatgcacacccgccacgctctcggtccccaattaccgctttttgtcgcctttcagcctaccggcgtgagcggtcccggccgctctccttttatcgccctcacgacgacactgctgcggtgcgactcgatggcattgtcttggggctcggtctagtaacgtagtggagctgtagtacctcccgcgtcgtcggagctcaccaggccaccggagagaggggatgaagcgccccgaatggccgtcctggcagtaggagggtcgtcgggcggacagagtcgttgtgccgtccaagtcgctccggcgcgagccaaagaggcggaacacgcagcggacgagctcacggtcgggttgtggaggctgagcgcgccgtgcgcgaggcggcatgtgtggaaagagcgtgcgatcggtttgggccgtgcggaggcatgtacgcgagttttggtgtgcggattgtgcgtaacggaggcgcgatgggtggttgacgattgcggtacggcggagagtgcgtggtagcgtgtggtgcgtccgtaaagtggattttgttgacgggtgggagatgagtgaagtatccggggatgtagctcaaatggtagagcgctcgcttagcatgcgagaggtacagggatcgacaccctgcttctccaggcgtgtgtagtatagtggtcagtacctcaccttgtggcggtgaaatccctggttcgaatccgggcacgcgcactcttatgctcattatgctgcttttacgtgcgcgttatggacgctgcgccgcccctagccgtcgccatgcacacccgccacgctctcggtccccaattaccgctttttgtcgcctttcagcctaccggcgtgagcggtcccggccgctctccttttatcgccctcacgacgacactgctgcggtgcgactcgatggcattgtcttggggctcggtctagtaacgtagtggagctgtagtacctcccgcgtcgtcggagctcaccaggccaccggagagaggggatgaagcgccccgaatggccgtcctggcagtaggagggtacagtcgttgtgccgtccaagtcgctccggcgcgagccaaagaggcggaacacgcagcggacgagctcacggtcgggttgtggaggctgagcgcgccgtgcgcgaggcggcatgtgtggaaagagcgtgcgatcggtttgggccgtgcggaggcatgtacgcgagttttggtgtgcggattgtgcgtaacggaggcgcgatgggtggttgacgattgcggtacggcggagagtgcgtggtagcgtgtggtgcgtccgtaaagtggattttgttgacgggtgggagatgagtgaagtatccggggatgtagctcaaatggtagagcgctcgcttagcatgcgagaggtacagggatcgataccctgcttctccaggcgtgtgtagtatagtggtcagtacctcaccttgtggcggtgaaatccctggttcgaatccgggcacgcgcactcttatgctcattatgctgcttttacgtgcgcgttatggacgctgcgccgcccctagccgtcgccatgcacacccgccacgctctcggtccccaattaccgctttttgtcgcctttcagcctaccggcgtgagcggtcccggccgctctccttttatcgccctcacgacgacactgctgcggtgcgactcgatggcattgtcttggggctcggtctagtaacgtagtggagctgtagtacctcccgcgtcgtcggagctcaccaggccaccggagagaggggatgaagcgccccgaatggccgtcctggcagtaggagggtacagtcgttgtgccgtccaagtcgctccggcgcgagccaaagaggcggaacacgcagcggacgagctcacggtcgggttgtggaggctgagcgcgccgtgcgcgaggcggcatgtgtggaaagagcgtgcgatcggtttgggccgtgcggaggcatgtacgcgagttttggtgtgcggattgtgcgtaacggaggcgcgatgggtggttgacgattgcggtacggcggagagtgcgtggtagcgtgtggtgcgtccgtaaagtggattttgttgacgggtgggagatgagtgaagtatccggggatgtagctcaaatggtagagcgctcgcttagcatgcgagaggtacagggatcgacaccctgcttctccaggcgtgtgtagtatagtggtcagtacctcaccttgtggcggtgaaatccctggttcgaatccgggcacgcgcactcttatgctcattatgctgcttttacgtgcgcgttatggacgctgcgccgcccctagccgtcgccatgcacacccgccacgctctcggtccccaattaccgctttttgtcgcctttcagcctaccggcgtgagcggtcccggccgctctccttttatcgccctcacgacgacactgctgcggtgcgactcgatggcattgtcttggggctcggtctagtaacgtagtggagctgtagtacctcccgcgtcgtcggagctcaccaggccaccggagagaggggatgaagcgccccgaatggccgtcctggcagtaggagggtcgtcgggcggacagagtcgttgtgccgtccaagtcgctccggcgcgagccaaagaggcggaacacgcagcggacgagctcacggtcgggttgtggaggctgagcgcgccgtgcgcgaggcggcatgtgtggaaagagcgtgcgatcggtttgggccgtgcggaggcatgtacgcgagttttggtgtgcggattgtgcgtaacggaggcgcgatgggtggttgacgattgcggtacggcggagagtgcgtggtagcgtgtggtgcgtccgtaaagtggattttgttgacgggtgggagatgagtgaagtatccggggatgtagctcaaatggtagagcgctcgcttagcatgcgagaggtacagggatcgataccctgcttctccaggcgtgtgtagtatagtggtcagtacctcaccttgtggcggtgaaatccctggttcgaatccgggcacgcgcactcttatgctcattatgctgcttttacgtgcgcgttatggacgctgcgccgcccctagccgtcgccatgcacacccgccacgctctcggtccccaattaccgctttttgtcgcctttcagcctaccggcgtgagcggtcccggccgctctccttttatcgccctcacgacgacactgctgcggtgcgactcgatggcattgtcttggggctcggtctagtaacgtagtggagcggtagtacctcccgcgtcgtcggagctcaccaggccaccggagagagtggatgaagcgccccgaatggccgtcctggcagtaggagggtcgtcgggcggacagtcgttgtgccgtccaagtcgctccggcgcgagccaaagaggcggaacacgcagcggacgagctcacggtcgagttgtggaggctgagcgcgccgtgcgcgaggcggcatgtgtggaaagagcgtgcgatcggtttgggccgtgcggaggcatgtacgcgagttttggtgtgcggattgtgcgtaacggaggcgcgatgggtggttgacgatnnnnnnnnnnnnnnnnnnnnnnnnnnnnnnnnnnnnnnnnnnnnnnnnnnnnnnnnnnnnnnnnnnnnnnnnnnnnnnnnnnnnnnnnnnnnnnnnnnnncgacgacactgctgcggtgcgactcgatggcattgtcttggggctcggtctagtaacgtagtggagcggtagtacctcccgcgtcgtcggagctcaccaggccaccggagagagtggatgaagcgccccgaatggccgtcctggcagtaggagggtcgtcgggcggacagagtcgttgtgccgtccaagtcgctccggcgcgagccaaagaggcggaacacgcagcggacgagctcacggtcgagttgtggaggctgagcgcgccgtgcgcgaggcggcatgtgtggaaagagcgtgcgatcggtttgggccgtgcggaggcatgcacgcgagttttggtgtgcggattgtgcgtaacggaggcgcgatgggtggttgacgattgcggtacggcggagagtgcgtggtagcgtgtggtgcgtccgtaaagtggattttgttgacgggtgggagatgagtgaagtatccggggatgtagctcaaatggtagagcgctcgcttagcatgcgagaggtacagggatcgataccctgcttctccaggcgtgtgtagtatagtggtcagtacctcaccttgtggcggtgaaatccctggttcgaatccgggcacgcgcactcttatgctcattatgctgcttttacgtgcgcgttatggacgctgcgccgcccctagccgtcgccatgcacacccgccacgctctcggtccccaattaccgctttttgtcgcctttcagcctaccggcgtgagcggtcccggccgctctccttttatcgccctcacgacgacactgctgcggtgcgactcgatggcattgtcttgtggctcggtctagtaacgtagtggagctgtagtacctcccgcgtcgtcggagctcaccaggccaccggagagagtggatgaagcgccccgaatggccgtcctggcagtaggagggtcgtcgggcggagccgtccaagtcgctccggcgcgagccaaagaggcggaacacgcagcggacgagctcacggtcgagttgtggaggctgagcgcgccgtgcgcgaggcggcatgtgtggaaagagcgtgcgatcggtttgggccgtgcggaggcatgcacgcgagttttggtgtgcggattgtgcgtaacggaggcgcgatgggtggttgacgattgcggtacggcggagagtgcgtggtagcgtgtggtgcgtccgtaaagtggattttgttgacgggtgggagacgagtaaagtatccggggatgtagctcaaatggtagagcgctcgcttagcatgcgagaggtacagggatcgataccctgcttctccaggcgtgtgtagtatagtggtcagtacctcaccttgtggcggtgaaatccctggttcgaatccgggcacgcgcactcttatgctcattatgctgcttttacgtgcgcgttatggacgctgcgccgcccctagccgtcgccatgcacacccgccacgctctcggtccccaattaccgctttttgtcgcctttcagcctaccggcgtgagcggtcccggccgctctccttttatcgccctcacgacgacactgctgcggtgcgactcgatggcattgtcttgtggctcggtctagtaacgtagtggagctgtagtacctcccgcgtcgtcggagctcaccaggccaccggagagagtggatgaagcgccccgaatggccgtcctggcagtaggagggtcgtcgggcggagccgtccaagtcgctccggcgcgagccaaagaggcggaacacgcagcggacgagctcacggtcgagttgtggaggctgagcgcgccgtgcgcgaggcggcatgtgtggaaagagcgtgcgatcggtttgggccgtgcggaggcatgcacgcgagttttggtgtgcggattgtgcgtaacggaggcgcgatgggtggttgacgattgcggtacggcggagagtgcgtggtagcgtgtggtgcgtccgtaaagtggattttgttgacgggtgggagatgagtgaagtatccggggatgtagctcaaatggtagagcgctcgcttagcatgcgagaggtatagggatcgataccctgcttctccaggcgtgtgtagtatagtggtcagtacctcaccttgtggcggtgaaatccctggttcgaatccgggcacgcgcactcttatgctcattatgctgcttttacgtgcgcgttatggacgctgcgccgcccctagccgtcgccatgcacacccgccacgctctcggtccccaattaccgctttttgtcgcctttcagcctaccggcgtgagcggtcccggccgctctccttttatcgccctcacgacgacactgctgcggtgcgactcgatggcattgtcttgtggctcggtctagtaacgtagtggagctgtagtacctcccgcgtcgtcggagctcaccaggccaccggagagagtggatgaagcgccccgaatggccgtcctggcagtaggagggtcgtcgggcggacagtcgttgtgccgtccaagtcgctccggcgcgagccaaagaggcggaacacgcagcggacgagctcacggtcgggttgtggaggctgagcgcgccgtgcgcgaggcggcatgtgtggaaagagcgtgcgatcggtttgggccgtgcggaggcatgtacgcgagttttggtgtgcggattgtgcgtaacggaggcgcgatgggtggttgacgattgcggtacggcggagagtgcgtggtagcgtgtggtgcgtccgtaaagtggattttgttgacgggtgggagacgagtaaagtatccggggatgtagctcaaatggtagagcgctcgcttagcatgcgagaggtacagggatcgataccctgcttctccaagcgtgtgtagtatagtggtcagtacctcaccttgtggcggtgaaatccctggttcgaatccgggcacgcgcactcttatgctcattatgctgcttttacgtgcgcgttatggacgctgcgccgcccctagccgtcgccatgcacacccgccacgctctcggtccccaattaccgctttttgtcgcctttcagcctaccggcgtgagcggtcccggccgctctcctcttgtcgccctcacgacgacactgctgcggtgcgactcgatggcattgtcttgtggctcggtctagtaacgtagtggagctgtagtacctcccgcgtcgtcggagctcaccaggccaccggagagagtggatgaagcgccccgaatggccgtcctggcagtaggagggtcgtcgggcggacagtcgttgtgccgtccaagtcgctccggcgcgagccaaagaggcggaacacgcagcggacgagctcacggtcgggttgtggaggctgagcgcgccgtgcgcgaggcggcatgtgtggaaagagcgtgcgatcggtttgggccgtgcggaggcatgtacgcgagttttggtgtgcggattgtgcgtaacggaggcgcgatgggtggttgacgattgcggtacggcggagagtgcgtggtagcgtgtggtgcgtccgtaaagtggattttgttgacgggtgggagacgagtaaagtatccggggatgtagctcaaatggtagagcgctcgcttagcatgcgagaggtatagggatcgataccctgcttctccaggcgtgtgtagtatagtggtcagtacctcaccttgtggcggtgaaatccctggttcgaatccgggcacgcgcactcttatgctcattatgctgcttttacgtgcgcgttatggacgctgcgccgcccctagccgtcgccatgcacacccgccacgctctcggtccccaattaccgctttttgtcgcctttcagcctaccggcgtgagtggtcccggccgctctcctcttgtcgccctcacgacgacactgctgcggtgcgactcgatggcattgtcttgtggctcggtctagtaacgtagtggagctgtagtacctcccgcgtcgttggagctcaccaggccaccggagagagtggatgaagcgccccgaatggccgtcctggcagtaggagggtcgtcgggcggacagagtcgttgtgccgtccaagtcgctccggcgcgagccaaagaggcggaacacgcagcggacgagctcacggtcgggttgtggaggctgagcgcgccgtgcgcgaggcggcatgtgtggaaagagcgtgcgatcggtttgggccgtgcggaggcatgtacgcgagttttggtgtgcggattgtgcgtaacggaggcgcgatgggtggttgacgattgcggtacggcggagagtgcgtggtagcgtgtggtgcgtccgtaaagtggattttgttgacgggtgggagatgagtgaagtatccggggatgtagctcaaatggtagagcgctcgcttagcatgcgagaggtacagggatcgacaccctgcttctccaggcgtgtgtagtatagtggtcagtacctcaccttgtggcggtgaaatccctggttcgaatccgggcacgcgcactcttatgctcattatgctgcttttacgtgcgcgttatggacgctgcgccgcccctagccgtcgccatgcacacccgccacgctctcggtccccaattaccgctttttgtcgcctttcagcctaccggcgtgagcggtcccggccgctctcctcttgtcgccctcacgacgacactgctgcggtgcgactcgatggcattgtcttgtggctcggtctagtaacgtagtggagctgtagtacctcccgcgtcgtcggagctcaccaggccaccggagagagtggatgaagcgccccgaatggccgtcctggcagtaggagggtcgtcgggcggacagtcgttgtgccgtccaagtcgctccggcgcgagccaaagaggcggaacacgcagcggacgagctcacggtcgggttgtggaggctgagcgcgccgtgcgcgaggcggcatgtgtggaaagagcgtgcgatcggtttgggccgtgcggaggcatgtacgcgagttttggtgtgcggattgtgcgtaacggaggcgcgatgggtggttgacgattgcggtacggcggagagtgcgtggtagcgtgtggtgcgtccgtaaagtggattttgttgacgggtgggagacgagtaaagtatccggggatgtagctcaaatggtagagcgctcgcttagcatgcgagaggtacagggatcgacaccctgcttctccaagcgtgtgtagtatagtggtcggggatccnnnnnnnnnnnnnnnnnnnnnnnnnnnnnnnnnnnnnnnnnnnnnnnnnnnnnnnnnnnnnnnnnnnnnnnnnnnnnnnnnnnnnnnnnnnnnnnnnnnnnnnnnnnnnnnnnnnnnnnnnnnnnnnnnnnnnnnnnnnnnnnnnnnnnnnnnnnnnnnnnnnnnnnnnnnnnnnnnnnnnnnnnnnnnnnnnnnnnnnnnnnnnnnnnnnnnnnnnnnnnnnnnnnnnnnnnnnnnnnnnnnnnnnnnnnnnnnnnnnnnnnnnnnnnnnnnnnnnnnnnnnnnnnnnnnnnnnnnnnnnnnnnnnnnnnnnnnnnnnnnnnnnnnnnnnnnnnnnnnnnnnnnnnnnnnnnnnnnnnnnnnnnnnnnnnnnnnnnnnnnnnnnnnnnnnnnnnnnnnnnnnnnnnnnnnnnnnnnnnnnnnnnnnnnnnnnnnnnnnnnnnnnnnnnnnnnnnnnnnnnnnnnnnnnnnnnnnnnnnnnnnnnnnnnnnnnnnnnnnnnnnnnnnnnnnnnnnnnnnnnnnnnnnnnnnnnnnnnnnnnnnnnnnnnnnnnnnnnnnnnnnnnnnnnnnnnnnnnnnnnnnnnnnnnnnnnnnnnnnnnnnnnnnnnnnnnnnnnnnnnnnnnnnnnnnnnnnnnnnnnnnnnnnnnnnnnnnnnnnnnnnnnnnnnnnnnnnnnnnnnnnnnnnnnnnnnnnnnnnnnnnnnnnnnnnnnnnnnnnnnnnnnnnnnnnnnnnnnnnnnnnnnnnnnnnnnnnnnnnnnnnnnnnnnnnnnnnnnnnnnnnnnnnnnnnnnnnnnnnnnnnnnnnnnnnnnnnnnnnnnnnnnnnnnnnnnnnnnnnnnnnnnnnnnnnnnnnnnnnnnnnnnnnnnnnnnnnnnnnnnnnnnnnnnnnnnnnnnnnnnnnnnnnnnnnnnnnnnnnnnnnnnnnnnnnnnnnnnnnnnnnnnnnnnnnnnnnnnnnnnnnnnnnnnnnnnnnnnnnnnnnnnnnnnnnnnnnnnnnnnnnnnnnnnnnnnnnnnnnnnnnnnnnnnnnnnnnnnnnnnnnnnnnnnnnnnnnnnnnnnnnnnnnnnnnnnnnnnnnnnnnnnnnnnnnnnnnnnnnnnnnnnnnnnnnnnnnnnnnnnnnnnnnnnnnnnnnnnnnnnnnnnnnnnnnnnnnnnnnnnnnnnnnnnnnnnnnnnnnnnnnnnnnnnnnnnnnnnnnnnnnnnnnnnnnnnnnnnnnnnnnnnnnnnnnnnnnnnnnnnnnnnnnnnnnnnnnnnnnnnnnnnnnnnnnnnnnnnnnnnnnnnnnnnnnnnnnnnnnnnnnnnnnnnnnnnnnnnnnnnnnnnnnnnnnnnnnnnnnnnnnnnnnnnnnnnnnnnnnnnnnnnnnnnnnnnnnnnnnnnnnnnnnnnnnnnnnnnnnnnnnnnnnnnnnnnnnnnnnnnnnnnnnnnnnnnnnnnnnnnnnnnnnnnnnnnnnnnnnnnnnnnnnnnnnnnnnnnnnnnnnnnnnnnnnnnnnnnnnnnnnnnnnnnnnnnnnnnnnnnnnnnnnnnnnnnnnnnnnnnnnnnnnnnnnnnnnnnnnnnnnnnnnnnnnnnnnnnnnnnnnnnnnnnnnnnnnnnnnnnnnnnnnnnnnnnnnnnnnnnnnnnnnnnnnnnnnnnnnnnnnnnnnnnnnnnnnnnnnnnnnnnnnnnnnnnnnnnnnnnnnnnnnnnnnnnnnnnnnnnnnnnnnnnnnnnnnnnnnnnnnnnnnnnnnnnnnnnnnnnnnnnnnnnnnnnnnnnnnnnnnnnnnnnnnnnnnnnnnnnnnnnnnnnnnnnnnnnnnnnnnnnnnnnnnnnnnnnnnnnnnnnnnnnnnnnnnnnnnnnnnnnnnnnnnnnnnnnnnnnnnnnnnnnnnnnnnnnnnnnnnnnnnnnnnnnnnnnnnnnnnnnnnnnnnnnnnnnnnnnnnnnnnnnnnnnnnnnnnnnnnnnnnnnnnnnnnnnnnnnnnnnnnnnnnnnnnnnnnnnnnnnnnnnnnnnnnnnnnnnnnnnnnnnnnnnnnnnnnnnnnnnnnnnnnnnnnnnnnnnnnnnnnnnnnnnnnnnnnnnnnnnnnnnnnnnnnnnnnnnnnnnnnnnnnnnnnnnnnnnnnnnnnnnnnnnnnnnnnnnnnnnnnnnnnnnnnnnnnnnnnnnnnnnnnnnnnnnnnnnnnnnnnnnnnnnnnnnnnnnnnnnnnnnnnnnnnnnnnnnnnnnnnnnnnnnnnnnnnnnnnnnnnnnnnnnnnnnnnnnnnnnnnnnnnnnnnnnnnnnnnnnnnnnnnnnnnnnnnnnnnnnnnnnnnnnnnnnnnnnnnnnnnnnnnnnnnnnnnnnnnnnnnnnnnnnnnnnnnnnnnnnnnnnnnnnnnnnnnnnnnnnnnnnnnnnnnnnnnnnnnnnnnnnnnnnnnnnnnnnnnnnnnnnnnnnnnnnnnnnnnnnnnnnnnnnnnnnnnnnnnnnnnnnnnnnnnnnnnnnnnnnnnnnnnnnnnnnnnnnnnnnnnnnnnnnnnnnnnnnnnnnnnnnnnnnnnnnnnnnnnnnnnnnnnnnnnnnnnnnnnnnnnnnnnnnnnnnnnnnnnnnnnnnnnnnnnnnnnnnnnnnnnnnnnnnnnnnnnnnnnnnnnnnnnnnnnnnnnnnnnnnnnnnnnnnnnnnnnnnnnnnnnnnnnnnnnnnnnnnnnnnnnnnnnnnnnnnnnnnnnnnnnnnnnnnnnnnnnnnnnnnnnnnnnnnnnnnnnnnnnnnnnnnnnnnnnnnnnnnnnnnnnnnnnnnnnnnnnnnnnnnnnnnnnnnnnnnnnnnnnnnnnnnnnnnnnnnnnnnnnnnnnnnnnnnnnnnnnnnnnnnnnnnnnnnnnnnnnnnnnnnnnnnnnnnnnnnnnnnnnnnnnnnnnnnnnnnnnnnnnnnnnnnnnnnnnnnnnnnnnnnnnnnnnnnnnnnnnnnnnnnnnnnnnnnnnnnnnnnnnnnnnnnnnnnnnnnnnnnnnnnnnnnnnnnnnnnnnnnnnnnnnnnnnnnnnnnnnnnnnnnnnnnnnnnnnnnnnnnnnnnnnnnnnnnnnnnnnnnnnnnnnnnnnnnnnnnnnnnnnnnnnnnnnnnnnnnnnnnnnnnnnnnnnnnnnnnnnnnnnnnnnnnnnnnnnnnnnnnnnnnnnnnnnnnnnnnnnnnnnnnnnnnnnnnnnnnnnnnnnnnnnnnnnnnnnnnnnnnnnnnnnnnnnnnnnnnnnnnnnnnnnnnnnnnnnnnnnnnnnnnnnnnnnnnnnnnnnnnnnnnnnnnnnnnnnnnnnnnnnnnnnnnnnnnnnnnnnnnnnnnnnnnnnnnnnnnnnnnnnnnnnnnnnnnnnnnnnnnnnnnnnnnnnnnnnnnnnnnnnnnnnnnnnnnnnnnnnnnnnnnnnnnnnnnnnnnnnnnnnnnnnnnnnnnnnnnnnnnnnnnnnnnnnnnnnnnnnnnnnnnnnnnnnnnnnnnnnnnnnnnnnnnnnnnnnnnnnnnnnnnnnnnnnnnnnnnnnnnnnnnnnnnnnnnnnnnnnnnnnnnnnnnnnnnnnnnnnnnnnnnnnnnnnnnnnnnnnnnnnnnnnnnnnnnnnnnnnnnnnnnnnnnnnnnnnnnnnnnnnnnnnnnnnnnnnnnnnnnnnnnnnnnnnnnnnnnnnnnnnnnnnnnnnnnnnnnnnnnnnnnnnnnnnnnnnnnnnnnnnnnnnnnnnnnnnnnnnnnnnnnnnnnnnnnnnnnnnnnnnnnnnnnnnnnnnnnnnnnnnnnnnnnnnnnnnnnnnnnnnnnnnnnnnnnnnnnnnnnnnnnnnnnnnnnnnnnnnnnnnnnnnnnnnnnnnnnnnnnnnnnnnnnnnnnnnnnnnnnnnnnnnnnnnnnnnnnnnnnnnnnnnnnnnnnnnnnnnnnnnnnnnnnnnnnnnnnnnnnnnnnnnnnnnnnnnnnnnnnnnnnnnnnnnnnnnnnnnnnnnnnnnnnnnnnnnnnnnnnnnnnnnnnnnnnnnnnnnnnnnnnnnnnnnnnnnnnnnnnnnnnnnnnnnnnnnnnnnnnnnnnnnnnnnnnnnnnnnnnnnnnnnnnnnnnnnnnnnnnnnnnnnnnnnnnnnnnnnnnnnnnnnnnnnnnnnnnnnnnnnnnnnnnnnnnnnnnnnnnnnnnnnnnnnnnnnnnnnnnnnnnnnnnnnnnnnnnnnnnnnnnnnnnnnnnnnnnnnnnnnnnnnnnnnnnnnnnnnnnnnnnnnnnnnnnnnnnnnnnnnnnnnnnnnnnnnnnnnnnnnnnnnnnnnnnnnnnnnnnnnnnnnnnnnnnnnnnnnnnnnnnnnnnnnnnnnnnnnnnnnnnnnnnnnnnnnnnnnnnnnnnnnnnnnnnnnnnnnnnnnnnnnnnnnnnnnnnnnnnnnnnnnnnnnnnnnnnnnnnnnnnnnnnnnnnnnnnnnnnnnnnnnnnnnnnnnnnnnnnnnnnnnnnnnnnnnnnnnnnnnnnnnnnnnnnnnnnnnnnnnnnnnnnnnnnnnnnnnnnnnnnnnnnnnnnnnnnnnnnnnnnnnnnnnnnnnnnnnnnnnnnnnnnnnnnnnnnnnnnnnnnnnnnnnnnnnnnnnnnnnnnnnnnnnnnnnnnnnnnnnnnnnnnnnnnnnnnnnnnnnnnnnnnnnnnnnnnnnnnnnnnnnnnnnnnnnnnnnnnnnnnnnnnnnnnnnnnnnnnnnnnnnnnnnnnnnnnnnnnnnnnnnnnnnnnnnnnnnnnnnnnnnnnnnnnnnnnnnnnnnnnnnnnnnnnnnnnnnnnnnnnnnnnnnnnnnnnnnnnnnnnnnnnnnnnnnnnnnnnnnnnnnnnnnnnnnnnnnnnnnnnnnnnnnnnnnnnnnnnnnnnnnnnnnnnnnnnnnnnnnnnnnnnnnnnnnnnnnnnnnnnnnnnnnnnnnnnnnnnnnnnnnnnnnnnnnnnnnnnnnnnnnnnnnnnnnnnnnnnnnnnnnnnnnnnnnnnnnnnnnnnnnnnnnnnnnnnnnnnnnnnnnnnnnnnnnnnnnnnnnnnnnnnnnnnnnnnnnnnnnnnnnnnnnnnnnnnnnnnnnnnnnnnnnnnnnnnnnnnnnnnnnnnnnnnnnnnnnnnnnnnnnnnnnnnnnnnnnnnnnnnnnnnnnnnnnnnnnnnnnnnnnnnnnnnnnnnnnnnnnnnnnnnnnnnnnnnnnnnnnnnnnnnnnnnnnnnnnnnnnnnnnnnnnnnnnnnnnnnnnnnnnnnnnnnnnnnnnnnnnnnnnnnnnnnnnnnnnnnnnnnnnnnnnnnnnnnnnnnnnnnnnnnnnnnnnnnnnnnnnnnnnnnnnnnnnnnnnnnnnnnnnnnnnnnnnnnnnnnnnnnnnnnnnnnnnnnnnnnnnnnnnnnnnnnnnnnnnnnnnnnnnnnnnnnnnnnnnnnnnnnnnnnnnnnnnnnnnnnnnnnnnnnnnnnnnnnnnnnnnnnnnnnnnnnnnnnnnnnnnnnnnnnnnnnnnnnnnnnnnnnnnnnnnnnnnnnnnnnnnnnnnnnnnnnnnnnnnnnnnnnnnnnnnnnnnnnnnnnnnnnnnnnnnnnnnnnnnnnnnnnnnnnnnnnnnnnnnnnnnnnnnnnnnnnnnnnnnnnnnnnnnnnnnnnnnnnnnnnnnnnnnnnnnnnnnnnnnnnnnnnnnnnnnnnnnnnnnnnnnnnnnnnnnnnnnnnnnnnnnnnnnnnnnnnnnnnnnnnnnnnnnnnnnnnnnnnnnnnnnnnnnnnnnnnnnnnnnnnnnnnnnnnnnnnnnnnnnnnnnnnnnnnnnnnnnnnnnnnnnnnnnnnnnnnnnnnnnnnnnnnnnnnnnnnnnnnnnnnnnnnnnnnnnnnnnnnnnnnnnnnnnnnnnnnnnnnnnnnnnnnnnnnnnnnnnnnnnnnnnnnnnnnnnnnnnnnnnnnnnnnnnnnnnnnnnnnnnnnnnnnnnnnnnnnnnnnnnnnnnnnnnnnnnnnnnnnnnnnnnnnnnnnnnnnnnnnnnnnnnnnnnnnnnnnnnnnnnnnnnnnnnnnnnnnnnnnnnnnnnnnnnnnnnnnnnnnnnnnnnnnnnnnnnnnnnnnnnnnnnnnnnnnnnnnnnnnnnnnnnnnnnnnnnnnnnnnnnnnnnnnnnnnnnnnnnnnnnnnnnnnnnnnnnnnnnnnnnnnnnnnnnnnnnnnnnnnnnnnnnnnnnnnnnnnnnnnnnnnnnnnnnnnnnnnnnnnnnnnnnnnnnnnnnnnnnnnnnnnnnnnnnnnnnnnnnnnnnnnnnnnnnnnnnnnnnnnnnnnnnnnnnnnnnnnnnnnnnnnnnnnnnnnnnnnnnnnnnnnnnnnnnnnnnnnnnnnnnnnnnnnnnnnnnnnnnnnnnnnnnnnnnnnnnnnnnnnnnnnnnnnnnnnnnnnnnnnnnnnnnnnnnnnnnnnnnnnnnnnnnnnnnnnnnnnnnnnnnnnnnnnnnnnnnnnnnnnnnnnnnnnnnnnnnnnnnnnnnnnnnnnnnnnnnnnnnnnnnnnnnnnnnnnnnnnnnnnnnnnnnnnnnnnnnnnnnnnnnnnnnnnnnnnnnnnnnnnnnnnnnnnnnnnnnnnnnnnnnnnnnnnnnnnnnnnnnnnnnnnnnnnnnnnnnnnnnnnnnnnnnnnnnnnnnnnnnnnnnnnnnnnnnnnnnnnnnnnnnnnnnnnnnnnnnnnnnnnnnnnnnnnnnnnnnnnnnnnnnnnnnnnnnnnnnnnnnnnnnnnnnnnnnnnnnnnnnnnnnnnnnnnnnnnnnnnnnnnnnnnnnnnnnnnnnnnnnnnnnnnnnnnnnnnnnnnnnnnnnnnnnnnnnnnnnnnnnnnnnnnnnnnnnnnnnnnnnnnnnnnnnnnnnnnnnnnnnnnnnnnnnnnnnnnnnnnnnnnnnnnnnnnnnnnnnnnnnnnnnnnnnnnnnnnnnnnnnnnnnnnnnnnnnnnnnnnnnnnnnnnnnnnnnnnnnnnnnnnnnnnnnnnnnnnnnnnnnnnnnnnnnnnnnnnnnnnnnnnnnnnnnnnnnnnnnnnnnnnnnnnnnnnnnnnnnnnnnnnnnnnnnnnnnnnnnnnnnnnnnnnnnnnnnnnnnnnnnnnnnnnnnnnnnnnnnnnnnnnnnnnnnnnnnnnnnnnnnnnnnnnnnnnnnnnnnnnnnnnnnnnnnnnnnnnnnnnnnnnnnnnnnnnnnnnnnnnnnnnnnnnnnnnnnnnnnnnnnnnnnnnnnnnnnnnnnnnnnnnnnnnnnnnnnnnnnnnnnnnnnnnnnnnnnnnnnnnnnnnnnnnnnnnnnnnnnnnnnnnnnnnnnnnnnnnnnnnnnnnnnnnnnnnnnnnnnnnnnnnnnnnnnnnnnnnnnnnnnnnnnnnnnnnnnnnnnnnnnnnnnnnnnnnnnnnnnnnnnnnnnnnnnnnnnnnnnnnnnnnnnnnnnnnnnnnnnnnnnnnnnnnnnnnnnnnnnnnnnnnnnnnnnnnnnnnnnnnnnnnnnnnnnnnnnnnnnnnnnnnnnnnnnnnnnnnnnnnnnnnnnnnnnnnnnnnnnnnnnnnnnnnnnnnnnnnnnnnnnnnnnnnnnnnnnnnnnnnnnnnnnnnnnnnnnnnnnnnnnnnnnnnnnnnnnnnnnnnnnnnnnnnnnnnnnnnnnnnnnnnnnnnnnnnnnnnnnnnnnnnnnnnnnnnnnnnnnnnnnnnnnnnnnnnnnnnnnnnnnnnnnnnnnnnnnnnnnnnnnnnnnnnnnnnnnnnnnnnnnnnnnnnnnnnnnnnnnnnnnnnnnnnnnnnnnnnnnnnnnnnnnnnnnnnnnnnnnnnnnnnnnnnnnnnnnnnnnnnnnnnnnnnnnnnnnnnnnnnnnnnnnnnnnnnnnnnnnnnnnnnnnnnnnnnnnnnnnnnnnnnnnnnnnnnnnnnnnnnnnnnnnnnnnnnnnnnnnnnnnnnnnnnnnnnnnnnnnnnnnnnnnnnnnnnnnnnnnnnnnnnnnnnnnnnnnnnnnnnnnnnnnnnnnnnnnnnnnnnnnnnnnnnnnnnnnnnnnnnnnnnnnnnnnnnnnnnnnnnnnnnnnnnnnnnnnnnnnnnnnnnnnnnnnnnnnnnnnnnnnnnnnnnnnnnnnnnnnnnnnnnnnnnnnnnnnnnnnnnnnnnnnnnnnnnnnnnnnnnnnnnnnnnnnnnnnnnnnnnnnnnnnnnnnnnnnnnnnnnnnnnnnnnnnnnnnnnnnnnnnnnnnnnnnnnnnnnnnnnnnnnnnnnnnnnnnnnnnnnnnnnnnnnnnnnnnnnnnnnnnnnnnnnnnnnnnnnnnnnnnnnnnnnnnnnnnnnnnnnnnnnnnnnnnnnnnnnnnnnnnnnnnnnnnnnnnnnnnnnnnnnnnnnnnnnnnnnnnnnnnnnnnnnnnnnnnnnnnnnnnnnnnnnnnnnnnnnnnnnnnnnnnnnnnnnnnnnnnnnnnnnnnnnnnnnnnnnnnnnnnnnnnnnnnnnnnnnnnnnnnnnnnnnnnnnnnnnnnnnnnnnnnnnnnnnnnnnnnnnnnnnnnnnnnnnnnnnnnnnnnnnnnnnnnnnnnnnnnnnnnnnnnnnnnnnnnnnnnnnnnnnnnnnnnnnnnnnnnnnnnnnnnnnnnnnnnnnnnnnnnnnnnnnnnnnnnnnnnnnnnnnnnnnnnnnnnnnnnnnnnnnnnnnnnnnnnnnnnnnnnnnnnnnnnnnnnnnnnnnnnnnnnnnnnnnnnnnnnnnnnnnnnnnnnnnnnnnnnnnnnnnnnnnnnnnnnnnnnnnnnnnnnnnnnnnnnnnnnnnnnnnnnnnnnnnnnnnnnnnnnnnnnnnnnnnnnnnnnnnnnnnnnnnnnnnnnnnnnnnnnnnnnnnnnnnnnnnnnnnnnnnnnnnnnnnnnnnnnnnnnnnnnnnnnnnnnnnnnnnnnnnnnnnnnnnnnnnnnnnnnnnnnnnnnnnnnnnnnnnnnnnnnnnnnnnnnnnnnnnnnnnnnnnnnnnnnnnnnnnnnnnnnnnnnnnnnnnnnnnnnnnnnnnnnnnnnnnnnnnnnnnnnnnnnnnnnnnnnnnnnnnnnnnnnnnnnnnnnnnnnnnnnnnnnnnnnnnnnnnnnnnnnnnnnnnnnnnnnnnnnnnnnnnnnnnnnnnnnnnnnnnnnnnnnnnnnnnnnnnnnnnnnnnnnnnnnnnnnnnnnnnnnnnnnnnnnnnnnnnnnnnnnnnnnnnnnnnnnnnnnnnnnnnnnnnnnnnnnnnnnnnnnnnnnnnnnnnnnnnnnnnnnnnnnnnnnnnnnnnnnnnnnnnnnnnnnnnnnnnnnnnnnnnnnnnnnnnnnnnnnnnnnnnnnnnnnnnnnnnnnnnnnnnnnnnnnnnnnnnnnnnnnnnnnnnnnnnnnnnnnnnnnnnnnnnnnnnnnnnnnnnnnnnnnnnnnnnnnnnnnnnnnnnnnnnnnnnnnnnnnnnnnnnnnnnnnnnnnnnnnnnnnnnnnnnnnnnnnnnnnnnnnnnnnnnnnnnnnnnnnnnnnnnnnnnnnnnnnnnnnnnnnnnnnnnnnnnnnnnnnnnnnnnnnnnnnnnnnnnnnnnnnnnnnnnnnnnnnnnnnnnnnnnnnnnnnnnnnnnnnnnnnnnnnnnnnnnnnnnnnnnnnnnnnnnnnnnnnnnnnnnnnnnnnnnnnnnnnnnnnnnnnnnnnnnnnnnnnnnnnnnnnnnnnnnnnnnnnnnnnnnnnnnnnnnnnnnnnnnnnnnnnnnnnnnnnnnnnnnnnnnnnnnnnnnnnnnnnnnnnnnnnnnnnnnnnnnnnnnnnnnnnnnnnnnnnnnnnnnnnnnnnnnnnnnnnnnnnnnnnnnnnnnnnnnnnnnnnnnnnnnnnnnnnnnnnnnnnnnnnnnnnnnnnnnnnnnnnnnnnnnnnnnnnnnnnnnnnnnnnnnnnnnnnnnnnnnnnnnnnnnnnnnnnnnnnnnnnnnnnnnnnnnnnnnnnnnnnnnnnnnnnnnnnnnnnnnnnnnnnnnnnnnnnnnnnnnnnnnnnnnnnnnnnnnnnnnnnnnnnnnnnnnnnnnnnnnnnnnnnnnnnnnnnnnnnnnnnnnnnnnnnnnnnnnnnnnnnnnnnnnnnnnnnnnnnnnnnnnnnnnnnnnnnnnnnnnnnnnnnnnnnnnnnnnnnnnnnnnnnnnnnnnnnnnnnnnnnnnnnnnnnnnnnnnnnnnnnnnnnnnnnnnnnnnnnnnnnnnnnnnnnnnnnnnnnnnnnnnnnnnnnnnnnnnnnnnnnnnnnnnnnnnnnnnnnnnnnnnnnnnnnnnnnnnnnnnnnnnnnnnnnnnnnnnnnnnnnnnnnnnnnnnnnnnnnnnnnnnnnnnnnnnnnnnnnnnnnnnnnnnnnnnnnnnnnnnnnnnnnnnnnnnnnnnnnnnnnnnnnnnnnnnnnnnnnnnnnnnnnnnnnnnnnnnnnnnnnnnnnnnnnnnnnnnnnnnnnnnnnnnnnnnnnnnnnnnnnnnnnnnnnnnnnnnnnnnnnnnnnnnnnnnnnnnnnnnnnnnnnnnnnnnnnnnnnnnnnnnnnnnnnnnnnnnnnnnnnnnnnnnnnnnnnnnnnnnnnnnnnnnnnnnnnnnnnnnnnnnnnnnnnnnnnnnnnnnnnnnnnnnnnnnnnnnnnnnnnnnnnnnnnnnnnnnnnnnnnnnnnnnnnnnnnnnnnnnnnnnnnnnnnnnnnnnnnnnnnnnnnnnnnnnnnnnnnnnnnnnnnnnnnnnnnnnnnnnnnnnnnnnnnnnnnnnnnnnnnnnnnnnnnnnnnnnnnnnnnnnnnnnnnnnnnnnnnnnnnnnnnnnnnnnnnnnnnnnnnnnnnnnnnnnnnnnnnnnnnnnnnnnnnnnnnnnnnnnnnnnnnnnnnnnnnnnnnnnnnnnnnnnnnnnnnnnnnnnnnnnnnnnnnnnnnnnnnnnnnnnnnnnnnnnnnnnnnnnnnnnnnnnnnnnnnnnnnnnnnnnnnnnnnnntgcaccgcctccggtcgcgatagcgggaggtccggaaccaatggacctctcgaatgcaacggctgttggttatcaacagcaacaagaaagtaatgtacgatgcttccgttgcggaaggatcggtcactatgcccgagagtgcacggcacccgtgcaccgagatggtggtcgacgcggcgatgccgggcaacgtcgcggacaaacaaaaaacgctggaacccagtaggcgcggggcgccctactggtaatgcagttccgcgtgtcgaccttggacacgcgacactgaggactgcagcccccagtgaggttcatcctcactgcaagaaccaagatgacaagcctgaccttgtcatcctgaatgtgaactcgatgagagcaagcggctctctccgtgctttggtagattctggcgcgtcgaacaactttgttcgactgcgaagtctatcaaggcttgacttcgaggaggtaaagatacctcgaagtatgttggaggtacgactggcaacgggtgccgtcgtgaagaccgagaagcgcatggtacgcgtgcgcttcacgtatgaagatcaagagtttgtcgagacctttatcgtcctggatctggacgataagtttgacattgtattgggcatgccgtggcttgcacggcatgatccggtcatcgattgggagaagcgcactctcgtgcgcttcggtcgcgatagcggaacagagagcgatggacctgttgccgcaacgcacgcaccgacaggtgcgcgcgactctccagtcaggacagcgcctaatgccgctgtccaggagcgccctgggcgcgcgcgagcacacgcgcaagagcagcaagcgtcggcgtcgccgccgacggctgaaggagaaaatatgttgatctcggagatcgacacccgcttttcagcgaatcaggaagagtctccggcctcaaggggcacggatgacgcaggcaagtcacacgcctcagccgtggaggctgacgcgaatctgattggatcaggtctggccaatattaagagccaaagtgacgaaacgccgtcgactccgggagtcgatggattgggtgaatttgattcgtcggctcggggagccgacgcaccctccgtaatgggggtctctgccaatggttggcgtcgaggtgaagatggcgtgtcggctccgggagccgacgctgcaggcggtgcggacggttgcaaacgttccgcaccggaaaaacttgcatgctatcgtgcagccgggctgcacgacgaagcgccgggcgaccaagccgggcttggagtcgctcgcccgcgggatgaacccgccggcggtactaaagaagaacacccgtccacggctgggcctggacgaggtcgagaaccaagcggagccgggctccgcaaaacaagaagacggcgcatgcgaagatcgctgcgcatgtctcggcctggggccgagacgctacaaggaatgtctgccgggcagacggaggctgagaagccggacgtcgagacgttgaacgtcttgacgcgtacctgtgccgggttccggtacagggagatgactctcgctaaccctccgacacaagcatcggagttgacttcgcttccagtcatgagctggaagcgcttcgcgcgtgacttgcacgatggacgcatcgagcaaatatgcattctctcggacgccgagagaacgaagagcgagaatgaagaactgaggcagttcttcatggagaccaccactgagagcgaggacactctcagtgcgaagacgaagaaggagcgctttgaagagcagagctgggactcgttgaaaacgagtccctactacgagatcttacgggagtacgcggacgtacttccggaagagattcctgcggagcttccgcaggacaagggaatccagcacgagattgatctcgtgccgggcacgaagtactgtgtcacgaggcagtggccactgccgcgagagcaggtcaaagcgatcgacggctttttcgaaagtcgtcgcaaagctggacaagtgcgggaatcaaaatccccgcacagtgctccgacgttctgtgtcaagaagccacagggcggctggcgcatcgttcatgcgtataacaagctgaacgatgcgacgataccggcgcagacgccgatacctcgaaaagatgttatcatcgattcgatggccaggagcactatctacagtgctcttgatctgcgcgatgggttctatcagaccctcatgcgtgagagcgatatccctctcacggcagtgagcacgccgagcggcatgctctgggagtggctagtgatgccgcagggtctgaagaacgcccctgcgaccttcaacaggtgcgtgacgcacttgttgcgctcggtgcgcgacttcgcaccgagctacttcgacgatgtgttcgtccacagccgggctgcggacggaatgagcgatgttgagatgcacaaggtgcatctccggaagctgcttgcgctcatgtgcatcttcggggcgagcgagatacccgtggtcgggtgtctcgttgggaagaacggtgtccgccctgaccctgagaaggtcagagtgatcaatgagtggccgacgccgtcgaacgtcaaggaactgcggcagttccttggcttggccacgtacttgtgcaagtacgtgaaggactacgcgggcatgatacgcccgctgtcacagctcctgaagaaggacgtcgagtggatttggactgctgagtgtcagcaggccttcgatgcagtcaagcagggcttgactgaggcgccgatcttggcggtggccgaccaagatcgcccattccacgttgtgtgtgacgcatccgacttcgcaatcggatgtgcgttgatgcagcacgatcacgagggtcgtgatcgtgtcgtctactaccaatcgcgtcagctgaagccagctgagcgcaactacccggtacatgacaaggagctccttgccatgaagtacgcactcgcgaagttccgagtgtatctactcggaagcaaaccgttcgtggtctatacggaccacgcgtcgttgcggacggctgtgaagtcgccgcacatctcgcaacggatggcgagatggctctcattcttcgcagagtataacttccgggttgagtacaaacccggaagactcaatgtggtggccgacgcgctctcgcgtcgacctgactacgccacgactgatgccgacgtcaatgccattgacgccatgcgatcgagcaccccaatgtcgtcactgttggacgacgtgaaggtcgcgtacgcgcacgacgcggacgcgaagctcttgctggcctacggctcagcgccttctgaccaagctcgtcagaagctgccgaaacatcttcgtgcttgtgcacaccgttaccgggtgcacgacgggttattactctacagtgcagtcgacgacaacgcggaccgtgttgtcgtgcccaatgaccatgacctgcgactcaggatcatgtatgagtatcacgatgcaccgactgcggggcatccgggccgtgagaagacataccttcttctcacgcgagacttctactgggcccaccagtacaaatgggtgcgcaagtacgtccgtgcttgcgaggtttgtcaacgtgtgaagcctgcgcctttcgcgcaggctcccttgcagtcactaccaactccacgggagtgttggcagtccatgtctttggacttcgtgttcggtcttcccccggacagccaggggaacacgggcgttgtggtctttgttgaccgcttcagcaagatggtacatcttgctgcagtacccgctgaagtgactgcgaaacagacggcgcgtctgttcgttgacatggtgttcaaacaccatggcataccgatcgacattgtgtcggatcgagacccgcgcttcactgcacacctctggcaagaagtgtttacacttcttgggaggcaactttcgatgtcgactgcggaccatccgcagacggacgggcagaccgagcgcgtgaaccgcgtgctcgtagacgtgcttaagagctacgctcactcgttccaacactggagcgagtgcctgccgatggcggagttcgccatcaacaactcggtgcatgcctcgaccgggcatacaccgttctacgtgaatgccatcaggcacccacgcgtcccgagtctactcgggatggtggctccttccttaagtggggggggatctacgactccaacacagcagccgcagaatgcctctaacacttgtacagtgtcagccgcaacgacacaaagcaaagccgagaaccgcgcgtttgtgcagggcacagacgccgacaagagcaaaaagaagaagaagaacgggtctgtgcagggcacaaacaccacgaagaccaacgcagaggcagggcctactgctggaagcgagctgaacgagttcagctcggacgcaattcacttcgtacagcgcagacaagccgtcattcggtttgtccaggacgctattgcagcttctgtcgaccgacagaagttgaacgcagacaatgttggcaggggcaacactaatgaattcgagaagggttcattagtcttgttagctactcaaaacctgcctaaacatgccgtttccgacttcggggcgagcaagttcgctccgcgcttcatcggaccgttcactgtgctggcacggcacggcaacgcctacacactggacataccatctagtatgcgcctccatccaacgttctacgtcggaaggctgaagccatacctgcagcacgagctacctagctcggttgaaccgaagcagaagactcggcggaagccatcgtcctctccagcacgacttcgcgctggagcagcgggtcgagctaatggtccagctcggccggaacgatcgaggcggtctgggaggccgccgcaaactgcgaatactttagagcgccgaacgcagtgctctggaactactccacgaccggaactcggtcgtggggagacgcgagatcagggtcgacaccaagttgaccacacacggggcgtgttcccaccaccaccaccgccaattcgtgacgcacacggctcaactcgatggatagttgagcggattgttggtcacagtatcccgagaacgaacaggcaaccggttcgttttcgtatccgttggagaggattccctcccaaccaagatacatgggagccgcggaacgtcttgctcgaaggcgtcccggacatggtgagggcgtacgaagcccaccatgcgctgcacactggaacgtaatgcgagcgctgctgttaacagcagcgcccgaagacacttcgagggcagacataggtacctgccccccgcggcagcgacgcgcttcgcacgttgccgcgcatgctactcagcagcagagaggtcctccgctgctgcgccagcggtcttcgacttcgactctcttcaacgtcacgcattgaccaagcggtcaatggtggttgacgtgccgggaccggcacgtctaaccttgacggggggatagtgtaacggggttacacgcacaagtggctacagtcacttgtaactctaacagacacgacgtctgttagaggttcgaaagactttctcgtccttggtgtagacacaccaaaggctacatacatttaggatcaccacgacgggtggtccatagagacttaggattcctattggttgagagcagcatcttttagccaatgagtgacatgcatagcattggaatgctgccctccagccgttggcagattcctattttagaatattacatttagaggaagtcagaaacataaaacaaaaatagcagttctcatcttttaccaaaacacgctacttggagtctttattttgtttgaagtatactcatggatctcgagtatacttaactcaagtaaaagaaacccacgcttcctcatacacttgcgcatacgtgtaagccgtagtagtgagccaaggtaggcccactacacctggtagcactttgtagtccgtccaacgatcgactacctgaacgttcgtacggagctgtacgaacgaggagccgagaaccttttcatgagcgcggaggtgcccatggaaagctccacctcgcctgcaactcatgttgcacgcgctgactgcctccnnnnnnnnnnnnnnnnnnnnnnnnnnnnnnnnnnnnnnnnnnnnnnnnnnnnnnnnnnnnnnnnnnnnnnnnnnnnnnnnnnnnnnnnnnnnnnnnnnnnnnnnnnnnnnnnnnnnnnnnnnnnnnnnnnnnnnnnnnnnnnnnnnnnnnnnnnnnnnnnnnnnnnnnnnnnnnnnnnnnnnnnnnnnnnnnnnnnnnnnnnnnnnnnnnnnnnnnnnnnnnnnnnnnnnnnnnnnnnnnnnnnnnnnnnnnnnnnnnnnnnnnnnnnnnnnnnnnnnnnnnnnnnnnnnnnnnnnnnnnnnnnnnnnnnnnnnnnnnnnnnnnnnnnnnnnnnnnnnnnnnnnnnnnnnnnnnnnnnnnnnnnnnnnnnnnnnnnnnnnnnnnnnnnnnnnnnnnnnnnnnnnnnnnnnnnnnnnnnnnnnnnnnnnnnnnnnnnnnnnnnnnnnnnnnnnnnnnnnnnnnnnnnnnnnnnnnnnnnnnnnnnnnnnnnnnnnnnnnnnnnnnnnnnnnnnnnnnnnnnnnnnnnnnnnnnnnnnnnnnnnnnnnnnnnnnnnnnnnnnnnnnnnnnnnnnnnnnnnnnnnnnnnnnnnnnnnnnnnnnnnnnnnnnnnnnnnnnnnnnnnnnnnnnnnnnnnnnnnnnnnnnnnnnnnnnnnnnnnnnnnnnnnnnnnnnnnnnnnnnnnnnnnnnnnnnnnnnnnnnnnnnnnnnnnnnnnnnnnnnnnnnnnnnnnnnnnnnnnnnnnnnnnnnnnnnnnnnnnnnnnnnnnnnnnnnnnnnnnnnnnnnnnnnnnnnnnnnnnnnnnnnnnnnnnnnnnnnnnnnnnnnnnnnnnnnnnnnnnnnnnnnnnnnnnnnnnnnnnnnnnnnnnnnnnnnnnnnnnnnnnnnnnnnnnnnnnnnnnnnnnnnnnnnnnnnnnnnnnnnnnnnnnnnnnnnnnnnnnnnnnnnnnnnnnnnnnnnnnnnnnnnnnnnnnnnnnnnnnnnnnnnnnnnnnnnnnnnnnnnnnnnnnnnnnnnnnnnnnnnnnnnnnnnnnnnnnnnnnnnnnnnnnnnnnnnnnnnnnnnnnnnnnnnnnnnnnnnnnnnnnnnnnnnnnnnnnnnnnnnnnnnnnnnnnnnnnnnnnnnnnnnnnnnnnnnnnnnnnnnnnnnnnnnnnnnnnnnnnnnnnnnnnnnnnnnnnnnnnnnnnnnnnnnnnnnnnnnnnnnnnnnnnnnnnnnnnnnnnnnnnnnnnnnnnnnnnnnnnnnnnnnnnnnnnnnnnnnnnnnnnnnnnnnnnnnnnnnnnnnnnnnnnnnnnnnnnnnnnnnnnnnnnnnnnnnnnnnnnnnnnnnnnnnnnnnnnnnnnnnnnnnnnnnnnnnnnnnnnnnnnnnnnnnnnnnnnnnnnnnnnnnnnnnnnnnnnnnnnnnnnnnnnnnnnnnnnnnnnnnnnnnnnnnnnnnnnnnnnnnnnnnnnnnnnnnnnnnnnnnnnnnnnnnnnnnnnnnnnnnnnnnnnnnnnnnnnnnnnnnnnnnnnnnnnnnnnnnnnnnnnnnnnnnnnnnnnnnnnnnnnnnnnnnnnnnnnnnnnnnnnnnnnnnnnnnnnnnnnnnnnnnnnnnnnnnnnnnnnnnnnnnnnnnnnnnnnnnnnnnnnnnnnnnnnnnnnnnnnnnnnnnnnnnnnnnnnnnnnnnnnnnnnnnnnnnnnnnnnnnnnnnnnnnnnnnnnnnnnnnnnnnnnnnnnnnnnnnnnnnnnnnnnnnnnnnnnnnnnnnnnnnnnnnnnnnnnnnnnnnnnnnnnnnnnnnnnnnnnnnnnnnnnnnnnnnnnnnnnnnnnnnnnnnnnnnnnnnnnnnnnnnnnnnnnnnnnnnnnnnnnnnnnnnnnnnnnnnnnnnnnnnnnnnnnnnnnnnnnnnnnnnnnnnnnnnnnnnnnnnnnnnnnnnnnnnnnnnnnnnnnnnnnnnnnnnnnnnnnnnnnnnnnnnnnnnnnnnnnnnnnnnnnnnnnnnnnnnnnnnnnnnnnnnnnnnnnnnnnnnnnnnnnnnnnnnnnnnnnnnnnnnnnnnnnnnnnnnnnnnnnnnnnnnnnnnnnnnnnnnnnnnnnnnnnnnnnnnnnnnnnnnnnnnnnnnnnnnnnnnnnnnnnnnnnnnnnnnnnnnnnnnnnnnnnnnnnnnnnnnnnnnnnnnnnnnnnnnnnnnnnnnnnnnnnnnnnnnnnnnnnnnnnnnnnnnnnnnnnnnnnnnnnnnnnnnnnnnnnnnnnnnnnnnnnnnnnnnnnnnnnnnnnnnnnnnnnnnnnnnnnnnnnnnnnnnnnnnnnnnnnnnnnnnnnnnnnnnnnnnnnnnnnnnnnnnnnnnnnnnnnnnnnnnnnnnnnnnnnnnnnnnnnnnnnnnnnnnnnnnnnnnnnnnnnnnnnnnnnnnnnnnnnnnnnnnnnnnnnnnnnnnnnnnnnnnnnnnnnnnnnnnnnnnnnnnnnnnnnnnnnnnnnnnnnnnnnnnnnnnnnnnnnnnnnnnnnnnnnnnnnnnnnnnnnnnnnnnnnnnnnnnnnnnnnnnnnnnnnnnnnnnnnnnnnnnnnnnnnnnnnnnnnnnnnnnnnnnnnnnnnnnnnnnnnnnnnnnnnnnnnnnnnnnnnnnnnnnnnnnnnnnnnnnnnnnnnnnnnnnnnnnnnnnnnnnnnnnnnnnnnnnnnnnnnnnnnnnnnnnnnnnnnnnnnnnnnnnnnnnnnnnnnnnnnnnnnnnnnnnnnnnnnnnnnnnnnnnnnnnnnnnnnnnnnnnnnnnnnnnnnnnnnnnnnnnnnnnnnnnnnnnnnnnnnnnnnnnnnnnnnnnnnnnnnnnnnnnnnnnnnnnnnnnnnnnnnnnnnnnnnnnnnnnnnnnnnnnnnnnnnnnnnnnnnnnnnnnnnnnnnnnnnnnnnnnnnnnnnnnnnnnnnnnnnnnnnnnnnnnnnnnnnnnnnnnnnnnnnnnnnnnnnnnnnnnnnnnnnnnnnnnnnnnnnnnnnnnnnnnnnnnnnnnnnnnnnnnnnnnnnnnnnnnnnnnnnnnnnnnnnnnnnnnnnnnnnnnnnnnnnnnnnnnnnnnnnnnnnnnnnnnnnnnnnnnnnnnnnnnnnnnnnnnnnnnnnnnnnnnnnnnnnnnnnnnnnnnnnnnnnnnnnnnnnnnnnnnnnnnnnnnnnnnnnnnnnnnnnnnnnnnnnnnnnnnnnnnnnnnnnnnnnnnnnnnnnnnnnnnnnnnnnnnnnnnnnnnnnnnnnnnnnnnnnnnnnnnnnnnnnnnnnnnnnnnnnnnnnnnnnnnnnnnnnnnnnnnnnnnnnnnnnnnnnnnnnnnnnnnnnnnnnnnnnnnnnnnnnnnnnnnnnnnnnnnnnnnnnnnnnnnnnnnnnnnnnnnnnnnnnnnnnnnnnnnnnnnnnnnnnnnnnnnnnnnnnnnnnnnnnnnnnnnnnnnnnnnnnnnnnnnnnnnnnnnnnnnnnnnnnnnnnnnnnnnnnnnnnnnnnnnnnnnnnnnnnnnnnnnnnnnnnnnnnnnnnnnnnnnnnnnnnnnnnnnnnnnnnnnnnnnnnnnnnnnnnnnnnnnnnnnnnnnnnnnnnnnnnnnnnnnnnnnnnnnnnnnnnnnnnnnnnnnnnnnnnnnnnnnnnnnnnnnnnnnnnnnnnnnnnnnnnnnnnnnnnnnnnnnnnnnnnnnnnnnnnnnnnnnnnnnnnnnnnnnnnnnnnnnnnnnnnnnnnnnnnnnnnnnnnnnnnnnnnnnnnnnnnnnnnnnnnnnnnnnnnnnnnnnnnnnnnnnnnnnnnnnnnnnnnnnnnnnnnnnnnnnnnnnnnnnnnnnnnnnnnnnnnnnnnnnnnnnnnnnnnnnnnnnnnnnnnnnnnnnnnnnnnnnnnnnnnnnnnnnnnnnnnnnnnnnnnnnnnnnnnnnnnnnnnnnnnnnnnnnnnnnnnnnnnnnnnnnnnnnnnnnnnnnnnnnnnnnnnnnnnnnnnnnnnnnnnnnnnnnnnnnnnnnnnnnnnnnnnnnnnnnnnnnnnnnnnnnnnnnnnnnnnnnnnnnnnnnnnnnnnnnnnnnnnnnnnnnnnnnnnnnnnnnnnnnnnnnnnnnnnnnnnnnnnnnnnnnnnnnnnnnnnnnnnnnnnnnnnnnnnnnnnnnnnnnnnnnnnnnnnnnnnnnnnnnnnnnnnnnnnnnnnnnnnnnnnnnnnnnnnnnnnnnnnnnnnnnnnnnnnnnnnnnnnnnnnnnnnnnnnnnnnnnnnnnnnnnnnnnnnnnnnnnnnnnnnnnnnnnnnnnnnnnnnnnnnnnnnnnnnnnnnnnnnnnnnnnnnnnnnnnnnnnnnnnnnnnnnnnnnnnnnnnnnnnnnnnnnnnnnnnnnnnnnnnnnnnnnnnnnnnnnnnnnnnnnnnnnnnnnnnnnnnnnnnnnnnnnnnnnnnnnnnnnnnnnnnnnnnnnnnnnnnnnnnnnnnnnnnnnnnnnnnnnnnnnnnnnnnnnnnnnnnnnnnnnnnnnnnnnnnnnnnnnnnnnnnnnnnnnnnnnnnnnnnnnnnnnnnnnnnnnnnnnnnnnnnnnnnnnnnnnnnnnnnnnnnnnnnnnnnnnnnnnnnnnnnnnnnnnnnnnnnnnnnnnnnnnnnnnnnnnnnnnnnnnnnnnnnnnnnnnnnnnnnnnnnnnnnnnnnnnnnnnnnnnnnnnnnnnnnnnnnnnnnnnnnnnnnnnnnnnnnnnnnnnnnnnnnnnnnnnnnnnnnnnnnnnnnnnnnnnnnnnnnnnnnnnnnnnnnnnnnnnnnnnnnnnnnnnnnnnnnnnnnnnnnnnnnnnnnnnnnnnnnnnnnnnnnnnnnnnnnnnnnnnnnnnnnnnnnnnnnnnnnnnnnnnnnnnnnnnnnnnnnnnnnnnnnnnnnnnnnnnnnnnnnnnnnnnnnnnnnnnnnnnnnnnnnnnnnnnnnnnnnnnnnnnnnnnnnnnnnnnnnnnnnnnnnnnnnnnnnnnnnnnnnnnnnnnnnnnnnnnnnnnnnnnnnnnnnnnnnnnnnnnnnnnnnnnnnnnnnnnnnnnnnnnnnnnnnnnnnnnnnnnnnnnnnnnnnnnnnnnnnnnnnnnnnnnnnnnnnnnnnnnnnnnnnnnnnnnnnnnnnnnnnnnnnnnnnnnnnnnnnnnnnnnnnnnnnnnnnnnnnnnnnnnnnnnnnnnnnnnnnnnnnnnnnnnnnnnnnnnnnnnnnnnnnnnnnnnnnnnnnnnnnnnnnnnnnnnnnnnnnnnnnnnnnnnnnnnnnnnnnnnnnnnnnnnnnnnnnnnnnnnnnnnnnnnnnnnnnnnnnnnnnnnnnnnnnnnnnnnnnnnnnnnnnnnnnnnnnnnnnnnnnnnnnnnnnnnnnnnnnnnnnnnnnnnnnnnnnnnnnnnnnnnnnnnnnnnnnnnnnnnnnnnnnnnnnnnnnnnnnnnnnnnnnnnnnnnnnnnnnnnnnnnnnnnnnnnnnnnnnnnnnnnnnnnnnnnnnnnnnnnnnnnnnnnnnnnnnnnnnnnnnnnnnnnnnnnnnnnnnnnnnnnnnnnnnnnnnnnnnnnnnnnnnnnnnnnnnnnnnnnnnnnnnnnnnnnnnnnnnnnnnnnnnnnnnnnnnnnnnnnnnnnnnnnnnnnnnnnnnnnnnnnnnnnnnnnnnnnnnnnnnnnnnnnnnnnnnnnnnnnnnnnnnnnnnnnnnnnnnnnnnnnnnnnnnnnnnnnnnnnnnnnnnnnnnnnnnnnnnnnnnnnnnnnnnnnnnnnnnnnnnnnnnnnnnnnnnnnnnnnnnnnnnnnnnnnnnnnnnnnnnnnnnnnnnnnnnnnnnnnnnnnnnnnnnnnnnnnnnnnnnnnnnnnnnnnnnnnnnnnnnnnnnnnnnnnnnnnnnnnnnnnnnnnnnnnnnnnnnnnnnnnnnnnnnnnnnnnnnnnnnnnnnnnnnnnnnnnnnnnnnnnnnnnnnnnnnnnnnnnnnnnnnnnnnnnnnnnnnnnnnnnnnnnnnnnnnnnnnnnnnnnnnnnnnnnnnnnnnnnnnnnnnnnnnnnnnnnnnnnnnnnnnnnnnnnnnnnnnnnnnnnnnnnnnnnnnnnnnnnnnnnnnnnnnnnnnnnnnnnnnnnnnnnnnnnnnnnnnnnnnnnnnnnnnnnnnnnnnnnnnnnnnnnnnnnnnnnnnnnnnnnnnnnnnnnnnnnnnnnnnnnnnnnnnnnnnnnnnnnnnnnnnnnnnnnnnnnnnnnnnnnnnnnnnnnnnnnnnnnnnnnnnnnnnnnnnnnnnnnnnnnnnnnnnnnnnnnnnnnnnnnnnnnnnnnnnnnnnnnnnnnnnnnnnnnnnnnnnnnnnnnnnnnnnnnnnnnnnnnnnnnnnnnnnnnnnnnnnnnnnnnnnnnnnnnnnnnnnnnnnnnnnnnnnnnnnnnnnnnnnnnnnnnnnnnnnnnnnnnnnnnnnnnnnnnnnnnnnnnnnnnnnnnnnnnnnnnnnnnnnnnnnnnnnnnnnnnnnnnnnnnnnnnnnnnnnnnnnnnnnnnnnnnnnnnnnnnnnnnnnnnnnnnnnnnnnnnnnnnnnnnnnnnnnnnnnnnnnnnnnnnnnnnnnnnnnnnnnnnnnnnnnnnnnnnnnnnnnnnnnnnnnnnnnnnnnnnnnnnnnnnnnnnnnnnnnnnnnnnnnnnnnnnnnnnnnnnnnnnnnnnnnnnnnnnnnnnnnnnnnnnnnnnnnnnnnnnnnnnnnnnnnnnnnnnnnnnnnnnnnnnnnnnnnnnnnnnnnnnnnnnnnnnnnnnnnnnnnnnnnnnnnnnnnnnnnnnnnnnnnnnnnnnnnnnnnnnnnnnnnnnnnnnnnnnnnnnnnnnnnnnnnnnnnnnnnnnnnnnnnnnnnnnnnnnnnnnnnnnnnnnnnnnnnnnnnnnnnnnnnnnnnnnnnnnnnnnnnnnnnnnnnnnnnnnnnnnnnnnnnnnnnnnnnnnnnnnnnnnnnnnnnnnnnnnnnnnnnnnnnnnnnnnnnnnnnnnnnnnnnnnnnnnnnnnnnnnnnnnnnnnnnnnnnnnnnnnnnnnnnnnnnnnnnnnnnnnnnnnnnnnnnnnnnnnnnnnnnnnnnnnnnnnnnnnnnnnnnnnnnnnnnnnnnnnnnnnnnnnnnnnnnnnnnnnnnnnnnnnnnnnnnnnnnnnnnnnnnnnnnnnnnnnnnnnnnnnnnnnnnnnnnnnnnnnnnnnnnnnnnnnnnnnnnnnnnnnnnnnnnnnnnnnnnnnnnnnnnnnnnnnnnnnnnnnnnnnnnnnnnnnnnnnnnnnnnnnnnnnnnnnnnnnnnnnnnnnnnnnnnnnnnnnnnnnnnnnnnnnnnnnnnnnnnnnnnnnnnnnnnnnnnnnnnnnnnnnnnnnnnnnnnnnnnnnnnnnnnnnnnnnnnnnnnnnnnnnnnnnnnnnnnnnnnnnnnnnnnnnnnnnnnnnnnnnnnnnnnnnnnnnnnnnnnnnnnnnnnnnnnnnnnnnnnnnnnnnnnnnnnnnnnnnnnnnnnnnnnnnnnnnnnnnnnnnnnnnnnnnnnnnnnnnnnnnnnnnnnnnnnnnnnnnnnnnnnnnnnnnnnnnnnnnnnnnnnnnnnnnnnnnnnnnnnnnnnnnnnnnnnnnnnnnnnnnnnnnnnnnnnnnnnnnnnnnnnnnnnnnnnnnnnnnnnnnnnnnnnnnnnnnnnnnnnnnnnnnnnnnnnnnnnnnnnnnnnnnnnnnnnnnnnnnnnnnnnnnnnnnnnnnnnnnnnnnnnnnnnnnnnnnnnnnnnnnnnnnnnnnnnnnnnnnnnnnnnnnnnnnnnnnnnnnnnnnnnnnnnnnnnnnnnnnnnnnnnnnnnnnnnnnnnnnnnnnnnnnnnnnnnnnnnnnnnnnnnnnnnnnnnnnnnnnnnnnnnnnnnnnnnnnnnnnnnnnnnnnnnnnnnnnnnnnnnnnnnnnnnnnnnnnnnnnnnnnnnnnnnnnnnnnnnnnnnnnnnnnnnnnnnnnnnnnnnnnnnnnnnnnnnnnnnnnnnnnnnnnnnnnnnnnnnnnnnnnnnnnnnnnnnnnnnnnnnnnnnnnnnnnnnnnnnnnnnnnnnnnnnnnnnnnnnnnnnnnnnnnnnnnnnnnnnnnnnnnnnnnnnnnnnnnnnnnnnnnnnnnnnnnnnnnnnnnnnnnnnnnnnnnnnnnnnnnnnnnnnnnnnnnnnnnnnnnnnnnnnnnnnnnnnnnnnnnnnnnnnnnnnnnnnnnnnnnnnnnnnnnnnnnnnnnnnnnnnnnnnnnnnnnnnnnnnnnnnnnnnnnnnnnnnnnnnnnnnnnnnnnnnnnnnnnnnnnnnnnnnnnnnnnnnnnnnnnnnnnnnnnnnnnnnnnnnnnnnnnnnnnnnnnnnnnnnnnnnnnnnnnnnnnnnnnnnnnnnnnnnnnnnnnnnnnnnnnnnnnnnnnnnnnnnnnnnnnnnnnnnnnnnnnnnnnnnnnnnnnnnnnnnnnnnnnnnnnnnnnnnnnnnnnnnnnnnnnnnnnnnnnnnnnnnnnnnnnnnnnnnnnnnnnnnnnnnnnnnnnnnnnnnnnnnnnnnnnnnnnnnnnnnnnnnnnnnnnnnnnnnnnnnnnnnnnnnnnnnnnnnnnnnnnnnnnnnnnnnnnnnnnnnnnnnnnnnnnnnnnnnnnnnnnnnnnnnnnnnnnnnnnnnnnnnnnnnnnnnnnnnnnnnnnnnnnnnnnnnnnnnnnnnnnnnnnnnnnnnnnnnnnnnnnnnnnnnnnnnnnnnnnnnnnnnnnnnnnnnnnnnnnnnnnnnnnnnnnnnnnnnnnnnnnnnnnnnnnnnnnnnnnnnnnnnnnnnnnnnnnnnnnnnnnnnnnnnnnnnnnnnnnnnnnnnnnnnnnnnnnnnnnnnnnnnnnnnnnnnnnnnnnnnnnnnnnnnnnnnnnnnnnnnnnnnnnnnnnnnnnnnnnnnnnnnnnnnnnnnnnnnnnnnnnnnnnnnnnnnnnnnnnnnnnnnnnnnnnnnnnnnnnnnnnnnnnnnnnnnnnnnnnnnnnnnnnnnnnnnnnnnnnnnnnnnnnnnnnnnnnnnnnnnnnnnnnnnnnnnnnnnnnnnnnnnnnnnnnnnnnnnnnnnnnnnnnnnnnnnnnnnnnnnnnnnnnnnnnnnnnnnnnnnnnnnnnnnnnnnnnnnnnnnnnnnnnnnnnnnnnnnnnnnnnnnnnnnnnnnnnnnnnnnnnnnnnnnnnnnnnnnnnnnnnnnnnnnnnnnnnnnnnnnnnnnnnnnnnnnnnnnnnnnnnnnnnnnnnnnnnnnnnnnnnnnnnnnnnnnnnnnnnnnnnnnnnnnnnnnnnnnnnnnnnnnnnnnnnnnnnnnnnnnnnnnnnnnnnnnnnnnnnnnnnnnnnnnnnnnnnnnnnnnnnnnnnnnnnnnnnnnnnnnnnnnnnnnnnnnnnnnnnnnnnnnnnnnnnnnnnnnnnnnnnnnnnnnnnnnnnnnnnnnnnnnnnnnnnnnnnnnnnnnnnnnnnnnnnnnnnnnnnnnnnnnnnnnnnnnnnnnnnnnnnnnnnnnnnnnnnnnnnnnnnnnnnnnnnnnnnnnnnnnnnnnnnnnnnnnnnnnnnnnnnnnnnnnnnnnnnnnnnnnnnnnnnnnnnnnnnnnnnnnnnnnnnnnnnnnnnnnnnnnnnnnnnnnnnnnnnnnnnnnnnnnnnnnnnnnnnnnnnnnnnnnnnnnnnnnnnnnnnnnnnnnnnnnnnnnnnnnnnnnnnnnnnnnnnnnnnnnnnnnnnnnnnnnnnnnnnnnnnnnnnnnnnnnnnnnnnnnnnnnnnnnnnnnnnnnnnnnnnnnnnnnnnnnnnnnnnnnnnnnnnnnnnnnnnnnnnnnnnnnnnnnnnnnnnnnnnnnnnnnnnnnnnnnnnnnnnnnnnnnnnnnnnnnnnnnnnnnnnnnnnnnnnnnnnnnnnnnnnnnnnnnnnnnnnnnnnnnnnnnnnnnnnnnnnnnnnnnnnnnnnnnnnnnnnnnnnnnnnnnnnnnnnnnnnnnnnnnnnnnnnnnnnnnnnnnnnnnnnnnnnnnnnnnnnnnnnnnnnnnnnnnnnnnnnnnnnnnnnnnnnnnnnnnnnnnnnnnnnnnnnnnnnnnnnnnnnnnnnnnnnnnnnnnnnnnnnnnnnnnnnnnnnnnnnnnnnnnnnnnnnnnnnnnnnnnnnnnnnnnnnnnnnnnnnnnnnnnnnnnnnnnnnnnnnnnnnnnnnnnnnnnnnnnnnnnnnnnnnnnnnnnnnnnnnnnnnnnnnnnnnnnnnnnnnnnnnnnnnnnnnnnnnnnnnnnnnnnnnnnnnnnnnnnnnnnnnnnnnnnnnnnnnnnnnnnnnnnnnnnnnnnnnnnnnnnnnnnnnnnnnnnnnnnnnnnnnnnnnnnnnnnnnnnnnnnnnnnnnnnnnnnnnnnnnnnnnnnnnnnnnnnnnnnnnnnnnnnnnnnnnnnnnnnnnnnnnnnnnnnnnnnnnnnnnnnnnnnnnnnnnnnnnnnnnnnnnnnnnnnnnnnnnnnnnnnnnnnnnnnnnnnnnnnnnnnnnnnnnnnnnnnnnnnnnnnnnnnnnnnnnnnnnnnnnnnnnnnnnnnnnnnnnnnnnnnnnnnnnnnnnnnnnnnnnnnnnnnnnnnnnnnnnnnnnnnnnnnnnnnnnnnnnnnnnnnnnnnnnnnnnnnnnnnnnnnnnnnnnnnnnnnnnnnnnnnnnnnnnnnnnnnnnnnnnnnnnnnnnnnnnnnnnnnnnnnnnnnnnnnnnnnnnnnnnnnnnnnnnnnnnnnnnnnnnnnnnnnnnnnnnnnnnnnnnnnnnnnnnnnnnnnnnnnnnnnnnnnnnnnnnnnnnnnnnnnnnnnnnnnnnnnnnnnnnnnnnnnnnnnnnnnnnnnnnnnnnnnnnnnnnnnnnnnnnnnnnnnnnnnnnnnnnnnnnnnnnnnnnnnnnnnnnnnnnnnnnnnnnnnnnnnnnnnnnnnnnnnnnnnnnnnnnnnnnnnnnnnnnnnnnnnnnnnnnnnnnnnnnnnnnnnnnnnnnnnnnnnnnnnnnnnnnnnnnnnnnnnnnnnnnnnnnnnnnnnnnnnnnnnnnnnnnnnnnnnnnnnnnnnnnnnnnnnnnnnnnnnnnnnnnnnnnnnnnnnnnnnnnnnnnnnnnnnnnnnnnnnnnnnnnnnnnnnnnnnnnnnnnnnnnnnnnnnnnnnnnnnnnnnnnnnnnnnnnnnnnnnnnnnnnnnnnnnnnnnnnnnnnnnnnnnnnnnnnnnnnnnnnnnnnnnnnnnnnnnnnnnnnnnnnnnnnnnnnnnnnnnnnnnnnnnnnnnnnnnnnnnnnnnnnnnnnnnnnnnnnnnnnnnnnnnnnnnnnnnnnnnnnnnnnnnnnnnnnnnnnnnnnnnnnnnnnnnnnnnnnnnnnnnnnnnnnnnnnnnnnnnnnnnnnnnnnnnnnnnnnnnnnnnnnnnnnnnnnnnnnnnnnnnnnnnnnnnnnnnnnnnnnnnnnnnnnnnnnnnnnnnnnnnnnnnnnnnnnnnnnnnnnnnnnnnnnnnnnnnnnnnnnnnnnnnnnnnnnnnnnnnnnnnnnnnnnnnnnnnnnnnnnnnnnnnnnnnnnnnnnnnnnnnnnnnnnnnnnnnnnnnnnnnnnnnnnnnnnnnnnnnnnnnnnnnnnnnnnnnnnnnnnnnnnnnnnnnnnnnnnnnnnnnnnnnnnnnnnnnnnnnnnnnnnnnnnnnnnnnnnnnnnnnnnnnnnnnnnnnnnnnnnnnnnnnnnnnnnnnnnnnnnnnnnnnnnnnnnnnnnnnnnnnnnnnnnnnnnnnnnnnnnnnnnnnnnnnnnnnnnnnnnnnnnnnnnnnnnnnnnnnnnnnnnnnnnnnnnnnnnnnnnnnnnnnnnnnnnnnnnnnnnnnnnnnnnnnnnnnnnnnnnnnnnnnnnnnnnnnnnnnnnnnnnnnnnnnnnnnnnnnnnnnnnnnnnnnnnnnnnnnnnnnnnnnnnnnnnnnnnnnnnnnnnnnnnnnnnnnnnnnnnnnnnnnnnnnnnnnnnnnnnnnnnnnnnnnnnnnnnnnnnnnnnnnnnnnnnnnnnnnnnnnnnnnnnnnnnnnnnnnnnnnnnnnnnnnnnnnnnnnnnnnnnnnnnnnnnnnnnnnnnnnnnnnnnnnnnnnnnnnnnnnnnnnnnnnnnnnnnnnnnnnnnnnnnnnnnnnnnnnnnnnnnnnnnnnnnnnnnnnnnnnnnnnnnnnnnnnnnnnnnnnnnnnnnnnnnnnnnnnnnnnnnnnnnnnnnnnnnnnnnnnnnnnnnnnnnnnnnnnnnnnnnnnnnnnnnnnnnnnnnnnnnnnnnnnnnnnnnnnnnnnnnnnnnnnnnnnnnnnnnnnnnnnnnnnnnnnnnnnnnnnnnnnnnnnnnnnnnnnnnnnnnnnnnnnnnnnnnnnnnnnnnnnnnnnnnnnnnnnnnnnnnnnnnnnnnnnnnnnnnnnnnnnnnnnnnnnnnnnnnnnnnnnnnnnnnnnnnnnnnnnnnnnnnnnnnnnnnnnnnnnnnnnnnnnnnnnnnnnnnnnnnnnnnnnnnnnnnnnnnnnnnnnnnnnnnnnnnnnnnnnnnnnnnnnnnnnnnnnnnnnnnnnnnnnnnnnnnnnnnnnnnnnnnnnnnnnnnnnnnnnnnnnnnnnnnnnnnnnnnnnnnnnnnnnnnnnnnnnnnnnnnnnnnnnnnnnnnnnnnnnnnnnnnnnnnnnnnnnnnnnnnnnnnnnnnnnnnnnnnnnnnnnnnnnnnnnnnnnnnnnnnnnnnnnnnnnnnnnnnnnnnnnnnnnnnnnnnnnnnnnnnnnnnnnnnnnnnnnnnnnnnnnnnnnnnnnnnnnnnnnnnnnnnnnnnnnnnnnnnnnnnnnnnnnnnnnnnnnnnnnnnnnnnnnnnnnnnnnnnnnnnnnnnnnnnnnnnnnnnnnnnnnnnnnnnnnnnnnnnnnnnnnnnnnnnnnnnnnnnnnnnnnnnnnnnnnnnnnnnnnnnnnnnnnnnnnnnnnnnnnnnnnnnnnnnnnnnnnnnnnnnnnnnnnnnnnnnnnnnnnnnnnnnnnnnnnnnnnnnnnnnnnnnnnnnnnnnnnnnnnnnnnnnnnnnnnnnnnnnnnnnnnnnnnnnnnnnnnnnnnnnnnnnnnnnnnnnnnnnnnnnnnnnnnnnnnnnnnnnnnnnnnnnnnnnnnnnnnnnnnnnnnnnnnnnnnnnnnnnnnnnnnnnnnnnnnnnnnnnnnnnnnnnnnnnnnnnnnnnnnnnnnnnnnnnnnnnnnnnnnnnnnnnnnnnnnnnnnnnnnnnnnnnnnnnnnnnnnnnnnnnnnnnnnnnnnnnnnnnnnnnnnnnnnnnnnnnnnnnnnnnnnnnnnnnnnnnnnnnnnnnnnnnnnnnnnnnnnnnnnnnnnnnnnnnnnnnnnnnnnnnnnnnnnnnnnnnnnnnnnnnnnnnnnnnnnnnnnnnnnnnnnnnnnnnnnnnnnnnnnnnnnnnnnnnnnnnnnnnnnnnnnnnnnnnnnnnnnnnnnnnnnnnnnnnnnnnnnnnnnnnnnnnnnnnnnnnnnnnnnnnnnnnnnnnnnnnnnnnnnnnnnnnnnnnnnnnnnnnnnnnnnnnnnnnnnnnnnnnnnnnnnnnnnnnnnnnnnnnnnnnnnnnnnnnnnnnnnnnnnnnnnnnnnnnnnnnnnnnnnnnnnnnnnnnnnnnnnnnnnnnnnnnnnnnnnnnnnnnnnnnnnnnnnnnnnnnnnnnnnnnnnnnnnnnnnnnnnnnnnnnnnnnnnnnnnnnnnnnnnnnnnnnnnnnnnnnnnnnnnnnnnnnnnnnnnnnnnnnnnnnnnnnnnnnnnnnnnnnnnnnnnnnnnnnnnnnnnnnnnnnnnnnnnnnnnnnnnnnnnnnnnnnnnnnnnnnnnnnnnnnnnnnnnnnnnnnnnnnnnnnnnnnnnnnnnnnnnnnnnnnnnnnnnnnnnnnnnnnnnnnnnnnnnnnnnnnnnnnnnnnnnnnnnnnnnnnnnnnnnnnnnnnnnnnnnnnnnnnnnnnnnnnnnnnnnnnnnnnnnnnnnnnnnnnnnnnnnnnnnnnnnnnnnnnnnnnnnnnnnnnnnnnnnnnnnnnnnnnnnnnnnnnnnnnnnnnnnnnnnnnnnnnnnnnnnnnnnnnnnnnnnnnnnnnnnnnnnnnnnnnnnnnnnnnnnnnnnnnnnnnnnnnnnnnnnnnnnnnnnnnnnnnnnnnnnnnnnnnnnnnnnnnnnnnnnnnnnnnnnnnnnnnnnnnnnnnnnnnnnnnnnnnnnnnnnnnnnnnnnnnnnnnnnnnnnnnnnnnnnnnnnnnnnnnnnnnnnnnnnnnnnnnnnnnnnnnnnnnnnnnnnnnnnnnnnnnnnnnnnnnnnnnnnnnnnnnnnnnnnnnnnnnnnnnnnnnnnnnnnnnnnnnnnnnnnnnnnnnnnnnnnnnnnnnnnnnnnnnnnnnnnnnnnnnnnnnnnnnnnnnnnnnnnnnnnnnnnnnnnnnnnnnnnnnnnnnnnnnnnnnnnnnnnnnnnnnnnnnnnnnnnnnnnnnnnnnnnnnnnnnnnnnnnnnnnnnnnnnnnnnnnnnnnnnnnnnnnnnnnnnnnnnnnnnnnnnnnnnnnnnnnnnnnnnnnnnnnnnnnnnnnnnnnnnnnnnnnnnnnnnnnnnnnnnnnnnnnnnnnnnnnnnnnnnnnnnnnnnnnnnnnnnnnnnnnnnnnnnnnnnnnnnnnnnnnnnnnnnnnnnnnnnnnnnnnnnnnnnnnnnnnnnnnnnnnnnnnnnnnnnnnnnnnnnnnnnnnnnnnnnnnnnnnnnnnnnnnnnnnnnnnnnnnnnnnnnnnnnnnnnnnnnnnnnnnnnnnnnnnnnnnnnnnnnnnnnnnnnnnnnnnnnnnnnnnnnnnnnnnnnnnnnnnnnnnnnnnnnnnnnnnnnnnnnnnnnnnnnnnnnnnnnnnnnnnnnnnnnnnnnnnnnnnnnnnnnnnnnnnnnnnnnnnnnnnnnnnnnnnnnnnnnnnnnnnnnnnnnnnnnnnnnnnnnnnnnnnnnnnnnnnnnnnnnnnnnnnnnnnnnnnnnnnnnnnnnnnnnnnnnnnnnnnnnnnnnnnnnnnnnnnnnnnnnnnnnnnnnnnnnnnnnnnnnnnnnnnnnnnnnnnnnnnnnnnnnnnnnnnnnnnnnnnnnnnnnnnnnnnnnnnnnnnnnnnnnnnnnnnnnnnnnnnnnnnnnnnnnnnnnnnnnnnnnnnnnnnnnnnnnnnnnnnnnnnnnnnnnnnnnnnnnnnnnnnnnnnnnnnnnnnnnnnnnnnnnnnnnnnnnnnnnnnnnnnnnnnnnnnnnnnnnnnnnnnnnnnnnnnnnnnnnnnnnnnnnnnnnnnnnnnnnnnnnnnnnnnnnnnnnnnnnnnnnnnnnnnnnnnnnnnnnnnnnnnnnnnnnnnnnnnnnnnnnnnnnnnnnnnnnnnnnnnnnnnnnnnnnnnnnnnnnnnnnnnnnnnnnnnnnnnnnnnnnnnnnnnnnnnnnnnnnnnnnnnnnnnnnnnnnnnnnnnnnnnnnnnnnnnnnnnnnnnnnnnnnnnnnnnnnnnnnnnnnnnnnnnnnnnnnnnnnnnnnnnnnnnnnnnnnnnnnnnnnnnnnnnnnnnnnnnnnnnnnnnnnnnnnnnnnnnnnnnnnnnnnnnnnnnnnnnnnnnnnnnnnnnnnnnnnnnnnnnnnnnnnnnnnnnnnnnnnnnnnnnnnnnnnnnnnnnnnnnnnnnnnnnnnnnnnnnnnnnnnnnnnnnnnnnnnnnnnnnnnnnnnnnnnnnnnnnnnnnnnnnnnnnnnnnnnnnnnnnnnnnnnnnnnnnnnnnnnnnnnnnnnnnnnnnnnnnnnnnnnnnnnnnnnnnnnnnnnnnnnnnnnnnnnnnnnnnnnnnnnnnnnnnnnnnnnnnnnnnnnnnnnnnnnnnnnnnnnnnnnnnnnnnnnnnnnnnnnnnnnnnnnnnnnnnnnnnnnnnnnnnnnnnnnnnnnnnnnnnnnnnnnnnnnnnnnnnnnnnnnnnnnnnnnnnnnnnnnnnnnnnnnnnnnnnnnnnnnnnnnnnnnnnnnnnnnnnnnnnnnnnnnnnnnnnnnnnnnnnnnnnnnnnnnnnnnnnnnnnnnnnnnnnnnnnnnnnnnnnnnnnnnnnnnnnnnnnnnnnnnnnnnnnnnnnnnnnnnnnnnnnnnnnnnnnnnnnnnnnnnnnnnnnnnnnnnnnnnnnnnnnnnnnnnnnnnnnnnnnnnnnnnnnnnnnnnnnnnnnnnnnnnnnnnnnnnnnnnnnnnnnnnnnnnnnnnnnnnnnnnnnnnnnnnnnnnnnnnnnnnnnnnnnnnnnnnnnnnnnnnnnnnnnnnnnnnnnnnnnnnnnnnnnnnnnnnnnnnnnnnnnnnnnnnnnnnnnnnnnnnnnnnnnnnnnnnnnnnnnnnnnnnnnnnnnnnnnnnnnnnnnnnnnnnnnnnnnnnnnnnnnnnnnnnnnnnnnnnnnnnnnnnnnnnnnnnnnnnnnnnnnnnnnnnnnnnnnnnnnnnnnnnnnnnnnnnnnnnnnnnnnnnnnnnnnnnnnnnnnnnnnnnnnnnnnnnnnnnnnnnnnnnnnnnnnnnnnnnnnnnnnnnnnnnnnnnnnnnnnnnnnnnnnnnnnnnnnnnnnnnnnnnnnnnnnnnnnnnnnnnnnnnnnnnnnnnnnnnnnnnnnnnnnnnnnnnnnnnnnnnnnnnnnnnnnnnnnnnnnnnnnnnnnnnnnnnnnnnnnnnnnnnnnnnnnnnnnnnnnnnnnnnnnnnnnnnnnnnnnnnnnnnnnnnnnnnnnnnnnnnnnnnnnnnnnnnnnnnnnnnnnnnnnnnnnnnnnnnnnnnnnnnnnnnnnnnnnnnnnnnnnnnnnnnnnnnnnnnnnnnnnnnnnnnnnnnnnnnnnnnnnnnnnnnnnnnnnnnnnnnnnnnnnnnnnnnnnnnnnnnnnnnnnnnnnnnnnnnnnnnnnnnnnnnnnnnnnnnnnnnnnnnnnnnnnnnnnnnnnnnnnnnnnnnnnnnnnnnnnnnnnnnnnnnnnnnnnnnnnnnnnnnnnnnnnnnnnnnnnnnnnnnnnnnnnnnnnnnnnnnnnnnnnnnnnnnnnnnnnnnnnnnnnnnnnnnnnnnnnnnnnnnnnnnnnnnnnnnnnnnnnnnnnnnnnnnnnnnnnnnnnnnnnnnnnnnnnnnnnnnnnnnnnnnnnnnnnnnnnnnnnnnnnnnnnnnnnnnnnnnnnnnnnnnnnnnnnnnnnnnnnnnnnnnnnnnnnnnnnnnnnnnnnnnnnnnnnnnnnnnnnnnnnnnnnnnnnnnnnnnnnnnnnnnnnnnnnnnnnnnnnnnnnnnnnnnnnnnnnnnnnnnnnnnnnnnnnnnnnnnnnnnnnnnnnnnnnnnnnnnnnnnnnnnnnnnnnnnnnnnnnnnnnnnnnnnnnnnnnnnnnnnnnnnnnnnnnnnnnnnnnnnnnnnnnnnnnnnnnnnnnnnnnnnnnnnnnnnnnnnnnnnnnnnnnnnnnnnnnnnnnnnnnnnnnnnnnnnnnnnnnnnnnnnnnnnnnnnnnnnnnnnnnnnnnnnnnnnnnnnnnnnnnnnnnnnnnnnnnnnnnnnnnnnnnnnnnnnnnnnnnnnnnnnnnnnnnnnnnnnnnnnnnnnnnnnnnnnnnnnnnnnnnnnnnnnnnnnnnnnnnnnnnnnnnnnnnnnnnnnnnnnnnnnnnnnnnnnnnnnnnnnnnnnnnnnnnnnnnnnnnnnnnnnnnnnnnnnnnnnnnnnnnnnnnnnnnnnnnnnnnnnnnnnnnnnnnnnnnnnnnnnnnnnnnnnnnnnnnnnnnnnnnnnnnnnnnnnnnnnnnnnnnnnnnnnnnnnnnnnnnnnnnnnnnnnnnnnnnnnnnnnnnnnnnnnnnnnnnnnnnnnnnnnnnnnnnnnnnnnnnnnnnnnnnnnnnnnnnnnnnnnnnnnnnnnnnnnnnnnnnnnnnnnnnnnnnnnnnnnnnnnnnnnnnnnnnnnnnnnnnnnnnnnnnnnnnnnnnnnnnnnnnnnnnnnnnnnnnnnnnnnnnnnnnnnnnnnnnnnnnnnnnnnnnnnnnnnnnnnnnnnnnnnnnnnnnnnnnnnnnnnnnnnnnnnnnnnnnnnnnnnnnnnnnnnnnnnnnnnnnnnnnnnnnnnnnnnnnnnnnnnnnnnnnnnnnnnnnnnnnnnnnnnnnnnnnnnnnnnnnnnnnnnnnnnnnnnnnnnnnnnnnnnnnnnnnnnnnnnnnnnnnnnnnnnnnnnnnnnnnnnnnnnnnnnnnnnnnnnnnnnnnnnnnnnnnnnnnnnnnnnnnnnnnnnnnnnnnnnnnnnnnnnnnnnnnnnnnnnnnnnnnnnnnnnnnnnnnnnnnnnnnnnnnnnnnnnnnnnnnnnnnnnnnnnnnnnnnnnnnnnnnnnnnnnnnnnnnnnnnnnnnnnnnnnnnnnnnnnnnnnnnnnnnnnnnnnnnnnnnnnnnnnnnnnnnnnnnnnnnnnnnnnnnnnnnnnnnnnnnnnnnnnnnnnnnnnnnnnnnnnnnnnnnnnnnnnnnnnnnnnnnnnnnnnnnnnnnnnnnnnnnnnnnnnnnnnnnnnnnnnnnnnnnnnnnnnnnnnnnnnnnnnnnnnnnnnnnnnnnnnnnnnnnnnnnnnnnnnnnnnnnnnnnnnnnnnnnnnnnnnnnnnnnnnnnnnnnnnnnnnnnnnnnnnnnnnnnnnnnnnnnnnnnnnnnnnnnnnnnnnnnnnnnnnnnnnnnnnnnnnnnnnnnnnnnnnnnnnnnnnnnnnnnnnnnnnnnnnnnnnnnnnnnnnnnnnnnnnnnnnnnnnnnnnnnnnnnnnnnnnnnnnnnnnnnnnnnnnnnnnnnnnnnnnnnnnnnnnnnnnnnnnnnnnnnnnnnnnnnnnnnnnnnnnnnnnnnnnnnnnnnnnnnnnnnnnnnnnnnnnnnnnnnnnnnnnnnnnnnnnnnnnnnnnnnnnnnnnnnnnnnnnnnnnnnnnnnnnnnnnnnnnnnnnnnnnnnnnnnnnnnnnnnnnnnnnnnnnnnnnnnnnnnnnnnnnnnnnnnnnnnnnnnnnnnnnnnnnnnnnnnnnnnnnnnnnnnnnnnnnnnnnnnnnnnnnnnnnnnnnnnnnnnnnnnnnnnnnnnnnnnnnnnnnnnnnnnnnnnnnnnnnaaaatgtccatgtattgcgtgtgccttggtgcctttctcgtcttgaataccatcccacgctggtggtctttcaaggacggtcgatctaaattcgatacatgtcaatcccgtcgcagctgtcaacgcctccccgcgctgaagcttgacgagaactagtactaaatgcgaataattgacgttgcgaccagtcgcgacgtgagtgcagagtactctttcacaacctggccgaacagatgtcacacagcagacaaagttagcatagacttctgcagctctttcgtgacggccctgaacttatcaaaggtctttaccaccgccttgactcactcgtgctcagaacgctgcagtataagctgctgtagttcttactcaacacgaaggttatgccccaacttgattatggcgggttagagcttcggatagcgcgccactttatcgtatgtgctagtctagcaattgtcgtttcgtaacagaggcgacagaagggagacacggcgtagcaaaccgagcgccccttatgtgttatcagcttggatgtcaccgcgtgcacctttgcaatgagctcctcctcggtcttgagaaagtccttcaccgtcaaattcaatctgtacctagcacatccaacggagggaataaccccttctttccagagtggctgaagtgcaccgaatggccgtcctggcagtaggagggtcgtcgggcggacagagtcgttgtgccgcccaagtcgctccggcgcgagccaaagaggcggaacacgcagcggacgagctcacggtcgggttgtggaggctgagcgcgccgtgcgcgaggcggcatgtgtggaaagagcgtgcgatcggtttgggccgtgcggaggcatgcacgcgagttttggtgtgcggattgtgcgtaacggaggcgcgatgggtggttgacgattgcggtacggcggagagtgcgtggtagcgtgtggtgcgtccgtaaagtggattttgttgacgggtgggagatgagtgaagtatccggggatgtagctcaaatggtagagcgctcgcttagcatgcgagaggtacagggatcgacaccctgcttctccagacgtgtgtagtatagtggtcagtacctcaccttgtggcggtgaaatccctggttcgaatccgggcacgcgcactcttatgctcattatgctgcttttacgtgcgcgttatggacgctgcgccgcccctagccgtcgccatgcacacccgccacgctctcggtccccaattaccgctttttgtcgcctttcagcctaccggcgtgagcggtcccggccgctctccttttatcgccctcacgacgacactgctgcggtgcgactcgatggcattgtcttgtggctcggtctagtaacgtagtggagctgtagtacctcccgcgtcgtcggagctcaccaggccaccggagagagtggatgaagcgccccgaatggccgtcctggcagtaggagggtcgtccggcggacagtcgttgtgccgtccaagtcgctccggcgcgagccaaagaggcggaacacgcagcggacgagctcacggtcgggttgtggaggctgagcgcgccgtgcgcgaggcggcatgtgtggaaagagcgtgcgatcggtttgggccgtgcggaggcatgcacgcgagttttggtgtgcggattgtgcgtaacggaggcgcgatgggtggttgacgattgcggtacggcggagagtgcgtggtagcgtgtggtgcgtccgtaaagtggattttgttgacgggtgggagatgagtgaagtatccggggatgtagctcaaatggtagagcgctcgcttagcatgcgagaggtacagggatcgataccctgcttctccaggcgtgtgtagtatagtggtcagtacctcaccttgtggcggtgaaatccctggttcgaatccgggcacgcgcactcttatgctcattatgctgcttttacgtgcgcgttatggacgctgcgccgcccctagccgtcgccatgcacacccgccacgctctcggtccccaattaccgctttttgtcgcctttcagcctaccggcgtgagcggtcccggccgctctcctcttgtcgccctcacgacgacactgctgcggtgcgactcgatggcattgtcttgtggctcggtctagtaacgtagtggagctgtagtacctcccgcgtcgtcggagctcaccaggccaccggagagagtggatgaagcgccccgaatggccgtcctggcagtaggagggtcgtcgggcggacagtcgttgtgccgtccaagtcgctccggcgcgagccaaagaggcggaacacgcagcggacgagctcacggtcgggttgtggaggctgagcgcgccgtgcgcgaggcggcatgtgtggaaagagcgtgcgatcggtttgggccgtgcggaggcatgtacgcgagttttggtgtgcggattgtgcgtaacggaggcgtgatgggtggttgacgattgcggtacggcggagagtgcgtggtagcgtgtggtgcgtccgtaaagtggattttgttgacgggtgggagacgagtaaagtatccggggatgtagctcaaatggtagagcgctcgcttagcatgcgagaggtacagggatcgataccctgcttctccaggcgtgtgtagtatagtggtcagtacctcaccttgtggcggtgaaatccctggttcgaatccgggcacgcgcactcttatgctcattatgctgcttttacgtgcgcgttatggacgctgcgccgcccctagccgtcgccatgcacacccgccacgctctcggtccccaattaccgctttttgtcgcctttcagcctaccggcgtgagcggtcccggccgctctcctcttgtcgccctcacgacgacactgctgcggtgcgactcgatggcattgtcttgtggctcggtctagtaacgtagtggagctgtagtacctcccgcgtcgtcggagctcaccaggccaccggagagagtggatgaagcgccccgaatggccgtcctggcagtaggagggtcgtccggcggacagtcgttgtgccgtccaagtcgctccggcgcgagccaaagaggcggaacacgcagcggacgagctcacggtcgggttgtggaggctgagcgcgccgtgcgcgaggcggcatgtcgtgcgatcggtttgggccgtgcggaggcatgtacgcgagttttggtgtgcggattgtgcgtaacggaggcgcgatgggtggttgacgattgcggtacggcggagagtgcgtggtagcgtgtggtgcgtccgtaaagtggattttgttgacgggtgggagacgagtaaagtatccggggatgtagctcaaatggtagagcgctcgcttagcatgcgagaggtacagggatcgataccctgcttctccaggcgtgtgtagtatagtggtcagtacctcaccttgtggcggtgaaatccctggttcgaatccgggcacgcgcactcttatgctcattatgctgcttttacgtgcgcgttatggacgctgcgccgcccctagccgtcgccatgcacacccgccacgctctcggtccccaattaccgctttttgtcgcctttcagcctaccggcgtgagcggtcccggccgctctcctcttgtcgccctcacgacgacactgctgcggtgcgactcgatggcattgtcttgtggctcggtctagtaacgtagtggagctgtagtacctcccgcgtcgtcggagctcaccaggccaccggagagagtggatgaagcgccccgaatggccgtcctggtagtaggagggtcgtcgggcggacagtcgttgtgccgtccaagtcgctccggcgcgagccaaagaggcggaacacgcagcggacgagctcacggtcgggttgtggaggctgagcgcgccgtgcgcgaggcggcatgtgtggaaagagcgtgcgatcggtttgggccgtgcggaggcatgtacgcgagttttggtgtgcggattgtgcgtaacggaggcgcgatgggtggttgacgattgcggtacggcggagagtgcgtggtagcgtgtggtgcgtccgtaaagtggattttgttgacgggtgggagatgagtgaagtatccggggatgtagctcaaatggtagagcgctcgcttagcatgcgagaggtacagggatcgacaccctgcttctccaggcgtgtgtagtatagtggtcagtacctcaccttgtggcggtgaaatccctggttcgaatccgggcacgcgcactcttatgctcattatgctgcttttacgtgcgcgttatggacgctgcgccgcccctagccgtcgccatgcacacccgccacgctctcggtccccaattaccgctttttgtcgcctttcagcctaccggcgtgagcggtcccggccgctctccttttatcgccctcacgacgacactgctgcggtgcgactcgatggcattgtcttggggctcggtctagtaacgtagtggagcggtagtacctcccgcgtcgtcggagctcaccaggccaccggagagagtggatgaagcgccccgaatggccgtcctggcagtaggagggtcgtcgggcggacagtcgttgtgccgtccaagtcgctccggcgcgagccaaagaggcggaacacgcagcggacgagctcacggtcgagttgtggaggctgagcgcgccgtgcgcgaggcggcatgtgtggaaagagcgtgcgatcggtttgggccgtgcggaggcatgcacgcgagttttggtgtgcggattgtgcgtaacggaggcgcgatgggtggttgacgattgcggtacggcggagagtgcgtggtagcgtgtggtgcgtccgtaaagtggattttgttgacgggtgggagatgagtgaagtatccggggatgtagctcaaatggtagagcgctcgcttagcatgcgagaggtacagggatcgacaccctgcttctccaggcgtgtgtagtatagtggtcagtacctcaccttgtggcggtgaaatccctggttcgaatccgggcacgcgcactcttatgctcattatgctgcttttacgtgcgcgttatggacgctgcgccgcccctagccgtcgccatgcacacccgccacgctctcggtccccaattaccgctttttgtcgcctttcagcctaccggcgtgagcggtcccggccgctctccttttatcgccctcacgacgacactgctgcggtgcgactcgatggcattgtcttggggctcggtctagtaacgtagtggagcggtagtacctcccgcgtcgtcggagctcaccaggccaccggagagaggggatgaagcgccccgaatggccgtcctggcagtaggagggtcgtcgggcggacagtcgttgtgccgtccaagtcgctccggcgcgagccaaagaggcggaacacgcagcggacgagctcacggtcgggttgtggaggctgagcgcgccgtgcgcgaggcggcatgtgtggaaagagcgtgcgatcggtttgggccgtgcggaggcatgtacgcgagttttggtgtgcggattgtgcgtaacggaggcgcgatgggtggttgacgattgcggtacggcggagagtgcgtggtagcgtgtggtgcgtccgtaaagtggattttgttgacgggtgggagatgagtgaagtatccggggatgtagctcaaatggtagagcgctcgcttagcatgcgagaggtacagggatcgataccctgcttctccaggcgtgtgtagtatagtggtcagtacctcaccttgtggcggtgaaatccctggttcgaatccgggcacgcgcactcttatgctcattatgctgcttttacgtgcgcgttatggacgctgcgccgcccctagccgtcgccatgcacacccgccacgctctcggtccccaattaccgctttttgtcgcctttcagcctaccggcgtgagcggtcccggccgctctccttttatcgccctcacgacgacactgctgcggtgcgactcgatggcattgtcttgtggctcggtctagtaacgtagtggagctgtagtacctcccgcgtcgtcggagctcaccaggccaccggagagaggggatgaagcgccccgaatggccgtcctggcagtaggagggtcgtcgggcggacagagtcgttgtgccgtccaagtcgctccggcgcgagccaaagaggcggaacacgcagcggacgagctcacggtcgagttgtggaggctgagcgcgccgtgcgcgaggcggcatgtgtggaaagagcgtgcgatcggtttgggccgtgcggaggcatgcacgcgagttttggtgtgcggattgtgcgtaacggaggcgcgatgggtggttgacgattgcggtacggcggagagtgcgtggtagcgtgtggtgcgtccgtaaagtggattttgttgacgggtgggagatgagtgaagtatccggggatgtagctcaaatggtagagcgctcgcttagcatgcgagaggtacagggatcgataccctgcttctccaggcgtgtgtagtatagtggtcagtacctcaccttgtggcggtgaaatccctggttcgaatccgggcacgcgcactcttatgctcattatgctgcttttacgtgcgcgttatggacgctgcgccgcccctagccgtcgccatgcacacccgccacgctctcggtccccaattaccgctttttgtcgcctttcagcctaccggcgtgagcggtcccggccgctctccttttatcgccctcacgacgacactgctgcggtgcgactcgatggcattgtcttgtggctcggtctagtaacgtagtggagctgtagtacctcccgcgtcgtcggagctcaccaggccaccggagagaggggatgaagcgccccgaatggccgtcctggcagtaggagggtcgtcgggcggacagagtcgttgtgccgtccaagtcgctccggcgcgagccaaagaggcggaacacgcagcggacgagctcacggtcgagttgtggaggctgagcgcgccgtgcgcgaggcggcatgtgtggaaagagcgtgcgatcggtttgggccgtgcggaggcatgcacgcgagttttggtgtgcggattgtgcgtaacggaggcgcgatgggtggttgacgattgcggtacggcggagagtgcgtggtagcgtgtggtgcgtccgtaaagtggattttgttgacgggtgggagatgagtgaagtatccggggatgtagctcaaatggtagagcgctcgcttagcatgcgagaggtacagggatcgataccctgcttctccaggcgtgtgtagtatagtggtcagtacctcaccttgtggcggtgaaatccctggttcgaatccgggcacgcgcactcttatgctcattatgctgcttttacgtgcgcgttatggacgctgcgccgcccctagccgtcgccatgcacacccgccacgctctcggtccccaattaccgctttttgtcgcctttcagcctaccggcgtgagcggtcccggccgctctccttttatcgccctcacgacgacactgctgcggtgcgactcgatggcattgtcttggggctcggtctagtaacgtagtggagctgtagtacctcccgcgtcgtcggagctcaccaggccaccggagagagtggatgaagcgccccgaatggccgtcctggcagtaggagggtcgtcgggcggagccgtccaagtcgctccggcgcgagccaaagaggcggaacacgcagcggacgagctcacggtcgagttgtggaggctgagcgcgccgtgcgcgaggcggcatgtgtggaaagagcgtgcgatcggtttgggccgtgcggaggcatgcacgcgagttttggtgtgcggattgtgcgtaacggaggcgcgatgggtggttgacgattgcggtacggcggagagtgcgtggtagcgtgtggtgcgtccgtaaagtggattttgttgacgggtgggagacgagtaaagtatccggggatgtagctcaaatggtagagcgctcgcttagcatgcgagaggtacagggatcgataccctgcttctccaggcgtgtgtagtatagtggtcagtacctcaccttgtggcggtgaaatccctggttcgaatccgggcacgcacactcttatgctcattatgctgcttttacgtgcgcgttatggacgctgcgccgcccctagccgtcgccatgcacacccgccacgctctcggtccccaattaccgctttttgtcgcctttcagcctaccggcgtgagcggtcccggccgctctcctcttgtcgccctcacgacgacactgctgcggtgcgactcgatggcattgtcttgtggctcggtctagtaacgtagtggagctgtagtacctcccgcgtcgtcggagctcaccaggccaccggagagagtggatgaagcgccccgaatggccgtcctggcagtaggagggtcgtccggcggacagtcgttgtgccgtccaagtcgctccggcgcgagccaaagaggcggaacacgcagcggacgagctcacggtcgggttgtggaggctgagcgcgccgtgcgcgaggcggcatgtgtggaaagagcgtgcgatcggtttgggccgtgcggaggcatgtacgcgagttttggtgtgcggattgtgcgtaacggaggcgcgatgggtggttgacgattgcggtacggcggagagtgcgtggtagcgtgtggtgcgtccgtaaagtggattttgttgacgggtgggagacgagtaaagtatccggggatgtagctcaaatggtagagcgctcgcttagcatgcgagaggtacagggatcgataccctgcttctccaggcgtgtgtagtatagtggtcagtacctcaccttgtggcggtgaaatccctggttcgaatccgggcacgcgcactcttatgctcattatgctgcttttacgtgcgcgttatggacgctgcgccgcccctagccgtcgccatgcacacccgccacgctctcggtccccaattaccgctttttgtcgcctttcagcctaccggcgtgagcggtcccggccgctctcctcttgtcgccctcacgacgacactgctgcggtgcgactcgatggcattgtcttgtggctcggtctagtaacgtagtggagctgtagtacctcccgcgtcgtcggagctcaccaggccaccggagagagtggatgaagcgccccgaatggccgtcctggcagtaggagggtcgtcgggcggacagtcgttgtgccgtccaagtcgctccggcgcgagccaaagaggcggaacacgcagcggacgagctcacggtcgggttgtggaggctgagcgcgccgtgcgcgaggcggcatgtgtggaaagagcgtgcgatcggtttgggccgtgcggaggcatgtacgcgagttttggtgtgcggattgtgcgtaacggaggcgcgatgggtggttgacgattgcggtacggcggagagtgcgtggtagcgtgtggtgcgtccgtaaagtggattttgttgacgggtgggagacgagtaaagtatccggggatgtagctcaaatggtagagcgctcgcttagcatgcgagaggtacagggatcgataccctgcttctccaggcgtgtgtagtatagtggtcagtacctcaccttgtggcggtgaaatccctggttcgaatccgggcacgcgcactcttatgctcattatgctgcttttacgtgcgcgttatggacgctgcgccgcccctagccgtcgccatgcacacccgccacgctctcggtccccaattaccgctttttgtcgcctttcagcctaccggcgtgagcggtcccggccgctctcctcttgtcgccctcacgacgacactgctgcggtgcgactcgatggcattgtcttgtggctcggtctagtaacgtagtggagctgtagtacctcccgcgtcgtcggagctcaccaggccaccggagagagtggatgaagcgccccgaatggccgtcctggcagtaggagggtcgtcgggcggacagacgttgtgccgnnnnnnnnnnnnnnnnnnnnnnnnnnnnnnnnnnnnnnnnnnnnnnnnnnnnnnnnnnnnnnnnnnnnnnnnnnnnnnnnnnnnnnnnnnnnnnnnnnnnnnnnnnnnnnnnnngtcgactctgaggatcccctgcggaggcatgtacgcgagttttggtgtgcggattgtgcgtaacggaggcgcgatgggtggttgacgattgcggtacggcggagagtgcgtggtagcgtgtggtgcgtccgtaaagtggattttgttgacgggtgggagacgagtaaagtatccggggatgtagctcaaatggtagagcgctcgcttagcatgcgagaggtacagggatcgataccctgcttctccaggcgtgtgtagtatagtggtcagtacctcaccttgtggcggtgaaatccctggttcgaatccgggcacgcgcactcttatgctcattatgctgcttttacgtgcgcgttatggacgctgcgccgcccctagccgtcgccatgcacacccgccacgctctcggtccccaattaccgctttttgtcgcctttcagcctaccggcgtgagcggtcccggccgctctcctcttgtcgccctcacgacgacactgctgcggtgcgactcgatggcattgtcttgtggctcggtctagtaacgtagtggagctgtagtacctcccgcgtcgtcggagctcaccaggccaccggagagagtggatgaagcgccccgaatggccgtcctggcagtaggagggtcgtccggcggacagtcgttgtgccgtccaagtcgctccggcgcgagccaaagaggcggaacacgcagcggacgagctcacggtcgggttgtggaggctgagcgcgccgtgcgcgaggcggcatgtgtggaaagagcgtgcgatcggtttgggccgtgcggaggcatgtacgcgagttttggtgtgcggattgtgcgtaacggaggcgcgatgggtggttgacgattgcggtacggcggagagtgcgtggtagcgtgtggtgcgtccgtaaagtggattttgttgacgggtgggagacgagtaaagtatccggggatgtagctcaaatggtagagcgctcgcttagcatgcgagaggtacagggatcgacaccctgcttctccaggcgtgtgtagtatagtggtcagtacctcaccttgtggcggtgaaatccctggttcgaatccgggcacgcgcactcttatgctcattatgctgcttttacgtgcgcgttatggacgctgcgccgcccctagccgtcgccatgcacacccgccacgctctcggtccccaattaccgctttttgtcgcctttcagcctaccggcgtgagcggtcccggccgctctcctcttgtcgccctcacgacgacactgctgcggtgcgactcgatggcattgtcttgtggctcggtctagtaacgtagtggagctgtagtacctcccgcgtcgtcggagctcaccaggccaccggagagagtggatgaagcgccccgaatggccgtcctggcagtaggagggtcgtccggcggacagtcgttgtgccgtccaagtcgctccggcgcgagccaaagaggcggaacacgcagcggacgagctcacggtcgggttgtggaggctgagcgcgccgtgcgcgaggcggcatgtgtggaaagagcgtgcgatcggtttgggccgtgcggaggcatgtacgcgagttttggtgtgcggattgtgcgtaacggaggcgcgatgggtggttgacgattgcggtacggcggagagtgcgtggtagcgtgtggtgcgtccgtaaagtggattttgttgacgggtgggagacgagtaaagtatccggggatgtagctcaaatggtagagcgctcgcttagcatgcgagaggtacagggatcgataccctgcttctccaagcgtgtgtagtatagtggtcagtacctcaccttgtggcggtgaaatccctggttcgaatccgggcacgcgcactcttatgctcattatgctgcttttacgtgcgcgttatggacgctgcgccgcccctagccgtcgccatgcacacccgccacgctctcggtccccaattaccgctttttgtcgcctttcagcctaccggcgtgagcggtcccggccgctctcctcttgtcgccctcacgacgacactgctgcggtgcgactcgatggcattgtcttgtggctcggtctagtaacgtagtggagctgtagtacctcccgcgtcgtcggagctcaccaggccaccggagagagtggatgaagcgccccgaatggccgtcctggcagtaggagggtcgtcgggcggacagtcgttgtgccgtccaagtcgctccggcgcgagccaaagaggcggaacacgcagcggacgagctcacggtcgggttgtggaggctgagcgcgccgtgcgcgaggcggcatgtgtggaaagagcgtgcgatcggtttgggccgtgcggaggcatgtacgcgagttttggtgtgcggattgtgcgtaacggaggcgcgatgggtggttgacgattgcggtacggcggagagtgcgtggtagcgtgtggtgcgtccgtaaagtggattttgttgacgggtgggagatgagtgaagtatccggggatgtagctcaaatggtagagcgctcgcttagcatgcgagaggtacagggatcgataccctgcttctccaggcgtgtgtagtatagtggtcagtacctcaccttgtggcggtgaaatccctggttcgaatccgggcacgcgcactcttatgctcattatgctgcttttacgtgcgcgttatggacgctgcgccgcccctagccgtcgccatgcacacccgccacgctctcggtccccaattaccgctttttgtcgcctttcagcctaccggcgtgagcggtcccggtcgctctccttttatcgccctcacgacgacactgctgcggtgcgactcgatggtattgtcttgtggctcggtctagtaacgtagtggagctgtagtacctcccgcgtcgtcggagctcaccaggccaccggagagagtggatgaagcgccccgaatggccgtcctggcagtaggagggtcgtccggcggacagtcgttgtgccgtccaagtcgctccggcgcgagccaaagaggcggaacacgcagcggacgagctcacggtcgggttgtggaggctgagcgcgccgtgcgcgaggcggcatgtgtggaaagagcgtgcgatcggtttgggccgtgcggaggcatgtacgcgagttttggtgtgcggattgtgcgtaacggaggcgcgatgggtggttgacgattgcggtacggcggagagtgcgtggtagcgtgtggtgcgtccgtaaagtggattttgttgacgggtgggagacgagtaaagtatccggggatgtagctcaaatggtagagcgctcgcttagcatgcgagaggtacagggatcgataccctgcttctccaggcgtgtgtagtatagtggtcagtacctcaccttgtggcggtgaaatccctggttcgaatccgggcacgcgcactcttatgctcattatgctgcttttacgtgcgcgttatggacgctgcgccgcccctagccgtcgccatgcacacccgccacgctctcggtccccaattaccgctttttgtcgcctttcagcctaccggcgtgagcggtcccggtcgctctccttttatcgccctcacgacgacactgctgcggtgcgactcgatggtattgtcttgtggctcggtctagtaacgtagtggagctgtagtacctcccgcgtcgtcggagctcaccaggccaccggagagagtggatgaagcgccccgaatggccgtcctggcagtaggagggtcgtccggcggacagtcgttgtgccgtccaagtcgctccggcgcgagccaaagaggcggaacacgcagcggacgagctcacggtcgggttgtggaggctgagcgcgccgtgcgcgaggcggcatgtgtggaaagagcgtgcgatcggtttgggccgtgcggaggcatgtacgcgagttttggtgtgcggattgtgcgtaacggaggcgcgatgggtggttgacgattgcggtacggcggagagtgcgtggtagcgtgtggtgcgtccgtaaagtggattttgttgacgggtgggagacgagtaaagtatccggggatgtagctcaaatggtagagcgctcgcttagcatgcgagaggtacagggatcgataccctgcttctccaggcgtgtgtagtatagtggtcagtacctcaccttgtggcggtgaaatccctggttcgaatccgggcacgcgcactcttatgctcattatgctgcttttacgtgcgcgttatggacgctgcgccgcccctagccgtcgccatgcacacccgccacgctctcggtccccaattaccgctttttgtcgcctttcagcctaccggcgtgagcggtcccggccgctctcctcttgtcgccctcacgacgacactgctgcggtgcgactcgatggcattgtcttgtggctcggtctagtaacgtagtggagctgtagtacctcccgcgtcgtcggagctcaccaggccaccggagagagtggatgaagcgccccgaatggccgtcctggcagtaggagggtcgtccggcggacagtcgttgtgccgtccaagtcgctccggcgcgagccaaagaggcggaacacgcagcggacgagctcacggtcgggttgtggaggctgagcgcgccgtgcgcgaggcggcatgtgtggaaagagcgtgcgatcggtttgggccgtgcggaggcatgtacgcgagttttggtgtgcggattgtgcgtaacggaggcgcgatgggtggttgacgattgcggtacggcggagagtgcgtggtagcgtgtggtgcgtccgtaaagtggattttgttgacgggtgggagacgagtaaagtatccggggatgtagctcaaatggtagagcgctcgcttagcatgcgagaggtacagggatcgataccctgcttctccaggcgtgtgtagtatagtggtcagtacctcaccttgtggcggtgaaatccctggttcgaatccgggcacgcgcactcttatgctcattatgctgcttttacgtgcgcgttatggacgctgcgccgcccctagccgtcgccatgcacacccgccacgctctcggtccccaattaccgctttttgtcgcctttcagcctaccggcgtgagcggtcccggccgctctcctcttgtcgccctcacgacgacactgctgcggtgcgactcgatggcattgtcttgtggctcggtctagtaacgtagtggagctgtagtacctcccgcgtcgtcggagctcaccaggccaccggagagagtggatgaagcgccccgaatggccgtcctggcagtaggagggtcgtcgggcggacagagtcgttgtgccgtccaagtcgctccggcgcgagccaaagaggcggaacacgcagcggacgagctcacggtcgggttgtggaggctgagcgcgccgtgcgcgaggcggcatgtgtggaaagagcgtgcgatcggtttgggccgtgcggaggcatgtacgcgagttttggtgtgcggattgtgcgtaacggaggcgcgatggtggttgacgattgcggtacggcggagagtgcgtggtagcgtgtggtgcgtccgtaaagtggattttgttgacgggtgggagatgagtaaagtatccggggatgtagctcaaatggtagagcgctcgcttagcatgcgagaggtatagggatcgacaccctgcttctccaggcgtgtgtagtatagtggtcagtacctcaccttgtggcggtgaaatccctggttcgaatccgggcacgcacactcttatgctcattatgctgcttttacgtgcgcgttatggacgctgcgccgcccctagccgtcgccatgcacacccgccacgctctcggtccccaattaccgctttttgtcgcctttcagcctaccggcgtgagcggtcccggccgctctcctcttgtcgccctcacgacgacactgctgcggtgcgactcgatggcattgtcttgtggctcggtctagtaacgtagtggagctgtagtacctcccgcgtcgtcggagctcaccaggccaccggagagagtggatgaagcgccccgaatggccgtcctggcagtaggagggtcgtcgggcggacagtcgttgtgccgtccaagtcgctccggcgcgagccaaagaggcggaacacgcagcggacgagctcacggtcgggttgtggaggctgagcgcgccgtgcgcgaggcggcatgtgtggaaagagcgtgcgatcggtttgggccgtgcggaggcatgtacgcgagttttggtgtgcggattgtgcgtaacggaggcgcgatgggtggttgacgattgcggtacggcggagagtgcgtggtagcgtgtggtgcgtccgtaaagtggattttgttgacgggtgggagacgagtgaagtatccggggatgtagctcaaatggtagagcgctcgcttagcatgcgagaggtacagggatcgataccctgcttctccaggcgtgtgtagtatagtggtcagtacctcaccttgtggcggtgaaatccctggttcgaatccgggcacgcgcactcttatgctcattatgctgcttttacgtgcgcgttatggacgctgcgccgcccctagccgtcgccatgcacacccgccacgctctcggtccccaattaccgctttttgtcgcctttcagcctaccggcgtgagcggtcccggccgctctccttttatcgccctcacgacgacactgctgcggtgcgactcgatggcattgtcttggggctcggtctagtaacgtagtggagctgtagtacctcccgcgtcgtcggagctcaccaggccaccggagagagtggatgaagcgccccgaatggccgtcctggcagtaggagggtcgtccggcggacagtcgttgtgccgtccaagtcgctccggcgcgagccaaagaggcggaacacgcagcggacgagctcacggtcgagttgtggaggctgagcgcgccgtgcgcgaggcggcatgtgtggaaagagcgtgcgatcggtttgggccgtgcggaggcatgtacgcgagttttggtgtgcggattgtgcgtaacggaggcgcgatgggtggttgacgattgcggtacggcggagagtgcgtggtagcgtgtggtgcgtccgtaaagtggattttgttgacgggtgggagatgagtgaagtatccggggatgtagctcaaatggtagagcgctcgcttagcatgcgagaggtacagggatcgacaccctgcttctccaggcgtgtgtagtatagtggtcagtacctcaccttgtggcggtgaaatccctggttcgaatccgggcacgcgcactcttatgctcattatgctgcttttacgtgcgcgttatggacgctgcgccgcccctagccgtcgccatgcacacccgccacgctctcggtccccaattaccgctttttgtcgcctttcagcctaccggcgtgagcggtcccggccgctctccttttatcgccctcacgacgacactgctgcggtgcgactcgatggcattgtcttggggctcggtctagtaacgtagtggagctgtagtacctcccgcgtcgtcggagctcaccaggccaccggagagagtggatgaagcgccccgaatggccgtcctggcagtaggagggtcgtcgggcggacagtcgttgtgccgtccaagtcgctccggcgcgagccaaagaggcggaacacgcagcggacgagctcacggtcgggttgtggaggctgagcgcgccgtgcgcgaggcggcatgtgtggaaagagcgtgcgatcggtttgggccgtgcggaggcatgtacgcgagttttggtgtgcggattgtgcgtaacggaggcgcgatgggtggttgacgattgcggtacggcggagagtgcgtggtagcgtgtggtgcgtccgtaaagtggattttgttgacgggtgggagatgagtgaagtatccggggatgtagctcaaatggtagagcgctcgcttagcatgcgagaggtacagggatcgacaccctgcttctccaggcgtgtgtagtatagtggtcagtacctcaccttgtggcggtgaaatccctggttcgaatccgggcacgcgcactcttatgctcattatgctgcttttacgtgcgcgttatggacgctgcgccgcccctagccgtcgccatgcacacccgccacgctctcggtccccaattaccgctttttgtcgcctttcagcctaccggcgtgagcggtcccggccgctctcctcttgtcgccctcacgacgacactgctgcggtgcgactcgatggcattgtcttgtggctcggtctagtaacgtagtggagctgtagtacctcccgcgtcgtcggagctcaccaggccaccggagagannnnnnnnnnnnnnnnnnnnnnnnnnnnnnnnnnnnnnnnnnnnnnnnnnnnnnnnnnnnnnnnnnnnnnnnnnnnnnnnnnnnnnnnnnnnnnnnnnnnnnnnnnnnnnnnnnnnnnnnnnnnnnnnnnnnnnnnnnnnnnnnnnnnnnnnnnnnnnnnnnnnnnnnnnnnnnnnnnnnnnnnnnnnnnnnnnnnnnnnnnnnnnnnnnnnnnnnnnnnnnnnnnnnnnnnnnnnnnnnnnnnnnnnnnnnnnnnnnnnnnnnnnnnnnnnnnnnnnnnnnnnnnnnnnnnnnnnnnnnnnnnnnnnnnnnnnnnnnnnnnnnnnnnnnnnnnnnnnnnnnnnnnnnnnnnnnnnnnnnnnnnnnnnnnnnnnnnnnnnnnnnnnnnnnnnnnnnnnnnnnnnnnnnnnnnnnnnnnnnnnnnnnnnnnnnnnnnnnnnnnnnnnnnnnnnnnnnnnnnnnnnnnnnnnnnnnnnnnnnnnnnnnnnnnnnnnnnnnnnnnnnnnnnnnnnnnnnnnnnnnnnnnnnnnnnnnnnnnnnnnnnnnnnnnnnnnnnnnnnnnnnnnnnnnnnnnnnnnnnnnnnnnnnnnnnnnnnnnnnnnnnnnnnnnnnnnnnnnnnnnnnnnnnnnnnnnnnnnnnnnnnnnnnnnnnnnnnnnnnnnnnnnnnnnnnnnnnnnnnnnnnnnnnnnnnnnnnnnnnnnnnnnnnnnnnnnnnnnnnnnnnnnnnnnnnnnnnnnnnnnnnnnnnnnnnnnnnnnnnnnnnnnnnnnnnnnnnnnnnnnnnnnnnnnnnnnnnnnnnnnnnnnnnnnnnnnnnnnnnnnnnnnnnnnnnnnnnnnnnnnnnnnnnnnnnnnnnnnnnnnnnnnnnnnnnnnnnnnnnnnnnnnnnnnnnnnnnnnnnnnnnnnnnnnnnnnnnnnnnnnnnnnnnnnnnnnnnnnnnnnnnnnnnnnnnnnnnnnnnnnnnnnnnnnnnnnnnnnnnnnnnnnnnnnnnnnnnnnnnnnnnnnnnnnnnnnnnnnnnnnnnnnnnnnnnnnnnnnnnnnnnnnnnnnnnnnnnnnnnnnnnnnnnnnnnnnnnnnnnnnnnnnnnnnnnnnnnnnnnnnnnnnnnnnnnnnnnnnnnnnnnnnnnnnnnnnnnnnnnnnnnnnnnnnnnnnnnnnnnnnnnnnnnnnnnnnnnnnnnnnnnnnnnnnnnnnnnnnnnnnnnnnnnnnnnnnnnnnnnnnnnnnnnnnnnnnnnnnnnnnnnnnnnnnnnnnnnnnnnnnnnnnnnnnnnnnnnnnnnnnnnnnnnnnnnnnnnnnnnnnnnnnnnnnnnnnnnnnnnnnnnnnnnnnnnnnnnnnnnnnnnnnnnnnnnnnnnnnnnnnnnnnnnnnnnnnnnnnnnnnnnnnnnnnnnnnnncgactctgaggatcccctaccgctttttgtcgcctttcagcctaccggcgtgagcggtcccggccgctctcctcttgtcgccctcacgacgacactgctgcggtgcgactcgatggcattgtcttgtggctcggtctagtaacgtagtggagctgtagtacctcccgcgtcgtcggagctcaccaggccaccggagagagtggatgaagcgccccgaatggccgtcctggcagtaggagggtcgtccggcggacagtcgttgtgccgtccaagtcgctccggcgcgagccaaagaggcggaacacgcagcggacgagctcacggtcgggttgtggaggctgagcgcgccgtgcgcgaggcggcatgtgtggaaagagcgtgcgatcggtttgggccgtgcggaggcatgtacgcgagttttggtgtgcggattgtgcgtaacggaggcgcgatgggtggttgacgattgcggtacggcggagagtgcgtggtagcgtgtggtgcgtccgtaaagtggattttgttgacgggtgggagacgagtaaagtatccggggatgtagctcaaatggtagagcgctcgcttagcatgcgagaggtacagggatcgataccctgcttctccaggcgtgtgtagtatagtggtcagtacctcaccttgtggcggtgaaatccctggttcgaatccgggcacgcgcactcttatgctcattatgctgcttttacgtgcgcgttatggacgctgcgccgcccctagccgtcgccatgcacacccgccacgctctcggtccccaattaccgctttttgtcgcctttcagcctaccggcgtgagcggtcccggccgctctcctcttgtcgccctcacgacgacactgctgcggtgcgactcgatggcattgtcttgtggctcggtctagtaacgtagtggagctgtagtacctcccgcgtcgtcggagctcaccaggccaccggagagagtggatgaagcgccccgaatggccgtcctggcagtaggagggtcgtcgggcggacagagtcgttgcgtttgagattgaagtagacctggattggcattgctactcgaaaacggtcttttattcgaaacggtcttttatttctagagcactcttgaaaaatagcgggaggtcgtctaatagtacgaggtcttctattcgtaaaaatccgttataacggtaaaaattggcgttttattcataccgctactgcgttttactttggaattcagtgacgtgaactaggatatatctgcaatgttatgagctctgttatgcggtagcaggtggtcgctcttgatctagcagagctggagggcgtgttaatcgatagtttacggtacatgatgtgcccttcgggttcttcacctcaaacgggtttggcccggttggcaaaatgaatccgggtttgtttgggcgctcggattggtcaaaattggtccctctctaatctccatacaaatccgaagcccagaaggaaagcgccagccgccgatcgagagaaggccaacaggcggagagaccaggagcgcgctgctatgagtcgcgcccgggtgtactgcgacgtgaacgaaacgcgcccgcgcgagtactgggactacgacacgctgaacgtggcttgggggtgcgtgcctgcctgctctcctacttcctctgttctgcctccccctctatgcctccccctgccgaaatcctggactatcgaggggggaagacgcgctgacgctgcgtgaggatgcgctaccaggcgctcttcggcgtatgaggggggctatatcattgtcttagcatgagggaagaggctcaccgactttttgtgcatacagagaccaagataactatgaagtgatccgcaagatcggtcgcggcaagtacagcgaggtgttcgagggctacaacgtggccaacaactctcgctgcgtcatcaagatcctcaagcctgtcaagaagaaaaaaatcaaacggtgcgccagtccgtcttagttgctcatgctggggctcttgatcaccagaaactcacttcatgctctaactatcatcaacctacagtgaaatcaagattctgcagaacctttctggcggcgtgaacattgtgcagctgctcgatgtcgtgcgggacccgcagtctaagacgcccagtctggtgaccgagtacgtgaacaacacggacttcaagaccctgtacccgacgctgagcgacttcgacatccgctactacttgttcgagctgctcaaggctctggactactgccactcgaacggtatcatgcaccgcgacgtcaagccgcacaacgtcatgatcgaccacgagaagcgccagctgcgtctgattgactggggccttgctgagttctaccaccctggccgcgagtacaacgtgcgcgtcgccagtcgctacttcaagggaccggagcttcttgtggacatgcaggagtacgactactcgctggacatgtggagtctgggctgcatgtttgcagccatgatcttccgcaaggagccgttcttccacggccacgacaattgtgaccagctggtcaagatcgccaaggtgaagggcacggacgagctgtttgactacctgacgacgtacgaccttgagctggacccgcagtacgacggtatcctgggcacgcacacgaagaagccgtgggagaagtttatcacacaggagaacaagcacctggtttcgcccgaggccatcgacttcctggatggcctgctgcgttacgaccaccaagagcgactaacagcaaaggaggccatgcagcacgcgtacttccagcccgtgcgcgatgcggccgaacagaagctgcgtggtggagcgcatcacaccgacgagatcaccagcgtatccgactcgagcgcgtaatttgcgtgcgcgcgatgaagaccaatacccgcttgttctgacgaaggaggatgagagagaacagagccgaatcgctgctatggaggaggtgctgcatgcatttcgaacaatcggtgacagcagtcaaccattgatcggttctgcaagatgcgggccgccaccagagcaacgtgacgacaaggggagcgagcggggcctagataacagagcgagaacacaatacaaggacatgccacgtcaagtagcgaggacgcggagggctacctgcgtgaatgaacgagacttgcgcggcaggatggatacgtttgccttcttgatttttgacggcgtgataggaggtggtagcgtgagtgcggcggtgtaacgtgtataggaagcctttactttttccatacaccacgttttcatattgcattgcttcaagttgtcatagtgcttcgttcgtttacctcgctctattccttcgcgtctaggtcttggcggataactgcgcggtccctcgtgaaaaaattgtgcgcgtaagtgctcggattggcgggccgattccgaagaatgccgcggaccagagcgcgcatgagcttcgccacgtccgggtggtctcgcaggtactgctcgttgtccatgcggatcatcacctacacagtcgcagtcagagataatgagcaccttcttccagcacaaaacccacagtcttcatgattttcccaccttggcttcgttgagcgccgacaattgctgaggtgtcagcacctgcatcctgcccacaggcggcagggcagctcccgcttcctccatcctcacttactcgaagctttagctctggcaaaagctcgcgtcgtttcggtgctgccaatgtgtggcgtacacaaaaaagagcatactcagctcaagtgaaaaaccggaccactgaccaccgctcacttaaccagggagcagcgcatcaaagcgcaaagcgccaccagctcaccaccagatccgacggcgcagcgattgcagccgcgaagatccatatcccagtcgaagcatgtggcgtgcctgtcgtgtagctgcgctccgccacctgcgcaccgaggccgcgcgcatgcccgtcgcccgcgcgccgctggcgctggcgctgcagcagcagctgggcagcgccacctgccacttcaccagcatcgccggcgtggaccgcgagctgctgctcacgcgctctgcacgcgacctgcgtgacgagctcggagactcgcagctcggtgccgtggccaaggcgctcaggggtgagctgtccgccgccgtcgcgcgtgaagacgtgaccagcgacgagatcatcgaccttttcacggcggcccagaagacccgcgccgtgaccgtcatgctggacgccttcgatttcctggacgcgaagttcccggcccacatcaacttcgctgtgtacggtgaggtgttccgcatcttgcagcgcaagaacaattggaagcgccttatcgagatctacgagaccgccaagccgcgcttcaaggctgtgcccgagatgatctaccgcttcggtattgttggatatctgcaggctgatgacatggatgctgccgtcaagacctggcaggagatgagcgatgccggccatgaaaccaccaacgaaatcacgtcgcgactcatgatggcgtatgcgcgcaagggtgacgtcgagaaggtgcaggagctgttcgagtcggttgacccgcagatcggctactggcacgagtcgtgcattgaccgtgtgatcctgagtatgggcatcatcgagcagcctgctaaggccttcgagttctacagcaactcgagcatgaaactgaacggcggcacgctaatcgcgctgctgagcgtatgtaacagcaacaactgcaagcagcaggcttccgacattttggcaaaccgcaagaagttcgatttgcgtcttgatgctcgcggctacaaccgtatcatgatgactttggagaacctggagcgcaacgatgagatcaaggaggttctggaggagatggttgaaaacaaggtgcggtttgacaccaggactaacaacatcatcgagcgtaacgccgagttcctcaagggcacgaatttcgttgtggatcctagcaagagcaaggctgccggcttcacgttaagcccgcgtcttcgcgaaatgctttctcaaggacaagcacaagatgcggcggccttggtcgactctatcgcgaagccggtggaggagtcgcaactgtcggaagattttgaaggcgaaatccctgagggtgccttgtttgtgagtccttctgtggctagagatgctgtgcgtgcgtacatcaaaacgaaccagcatgacaaggttggcgctctggtgaagggattctcagtcgttcccggtaagtatgcctacgctctggcagagatcatcggtcactacctgaagttgaggaacaagaccagtgacgagcttagctacaaggccatgaaggcaatgctagcccagggtattcagatttaccgcgtcgacgacgcgttgacgctattccgccgcttccacgacgctgacgccgctgtagagctatttgaccaagtgcttgctacgtactggggcaaggatgctcccacccccgcggcgcaccgcactgaggaggacgagaatgatgtggacagcagcgactcgaagcagacgtactttgtgaacttcaacattggcaaggtgatcaacttggttctgcagacattggcagagagtggcagggctacggaggctctggatactttaaccaagatggcgagccgtgacctgcagacgaaccaatccaactacatcaccattctgagctccatgcgtaaatacctacgaaacgttaaccacaaggacaggaagcacaaggtgctgtacgacatttccagcttccaggcagtgctgaaggacctcaagagccgcgggttgacggtgaaccgggctgttgtgggttacctgtgccccgcttacgtcggtgccaacaagcagcagcgccttgagctgctggaggctttcgcggaagctcagagtgaccctaacgacaactacatcttgccacacctgtgctatgaaacgttgctgacgttcacggcccaagagtgtgacatcgcggaggtgaaggcactttacgaagaagctgtgactactttgaacaacaaggagaatctcggtgtgccgcggggctgggtgagtgttctgatctcaaagcttgccaaggatggctacgttgaagaagccgagcaggccgtgaaggatatgcccaaggtgtgcggtggatatacgtaccgagctgcggtgtccgtgctgcgcagcgctttggaagcgaagaagcccgatgttgttgacaacatgatcgcgctcctggaagagcgggagttccacgtcggactggcggatgcctacgagttggtccacatggcccgtgaaaaggagctctcctcgaaggcgttggacattattcgtctgttcgagaagggcaacttgaaggagatggctgctgctgaggacggcaagggcaacttggaggccgcctacttccggcgtcagcgaggcgacgtccacgcgctccggaaggtgaagacgatgtacaccgtggcgctgaagtcttgtgagactggcggcctctggaagcaggcgctggtgctgcgcgagcaaatgacgacgctgctgggccaggaagctgtggacgagatcactgcgagtctgactgcacggcagcggaagcactgggagcgcaaggagaagaagtcggacgagcaggagtagaccaatagacaagacagctctggccctcattgcgttggccatcgggcaggtgacgaaaggatcggcagagcttgtggcaactggatagaccgtcagcaagagacaacgatataaaaaaaataaaacaacaaacaaacagaaagcaccaagccaataatattggcgagcgagatcggttcaacatattatgttgaaccgatctcgctcgcgacttgcactgtgagtgcggggtctctaatagagactcacttgtgtcgagcattcattcgtaagacagtttgacgacaaatcaaatttagccatgtgattggctaatattatgcgtggtgttgtccgtgtatgcccttggagggccgtctgcgtcgccgtcgtggcatgcaccagcaacggatagccgtgctgacgagcagaatcggcagcatgaacgtgtatttgtttcgttttcgatttcgtagtaatgtgaagtgcatcacagttatttggcctaactagcgacctactaaatgccaggtccttcaaatgaaagtgcgtattatacatattttatgaggtccgaggagctcttccatgaagccgcgtagtcagcgtaagtagggagatgcccttcggaggacacgacgcggttggtacacggagaactgaattgtgcttgagcgtgcattgaatagcaaacgactagaatgtacactcgagcactctctagaaacttgtcaacaaagccgaaatggaaacactacgtagattcaagcttaacagacagcaatagactggcgcggttataagcgctctagaatcgctgcctcttatgctacgtaactaaccacgttattgaaggaaggcttgcccgcatcatgatacgtacattgcaacctgacagtacgaaaactcctacaatatttccctcgtgacactattcgttaccatccaggcactgaaaagctctggacgtggcattttaagagcaacagatcagaacagccttagcgctaaggcttcacgcaaggcctggcgcggccgccgtggctgcagccagaatatcatcctgttgtcgacggacttacgcgccatgcaactgcgtcgtcttggcgaacaaaggtgccaccaacacagcctgcatccgcaccgctgccgtggttgagtgggcccgagcatgcacatgcagctctgcacgtcaagtagagcttttgaccaataatatggcgcaaactggtgtccgacaaactgtcttccgttttgagtgacaaaatacaatgtagccactggtatactaaaatcaagatgtaatcaaaatgcgttgattgcaaaacgtaagacgcattgtacggtatgctctctagggaccagtatcgtcttacgaaagagcatgaatctctattgtcggcggcccggccggactccggccacccgattggctgatttcctgcaaagtctcatgtggcgccgactggctgcggcagtggctcgccgctcgccgaatgcgcctcgcgtggacgttctcaggcttcggacgtgccgcccactagcgttgtcatgctcccagcacctgctcgtatctggccgaccgttttcttccagagatcgcgatgcgtcgcgcgtgaatgacgtgaaagtgcgggacatcgagctgcgcgagctggtgcggcggccgtggatcgagatgcaggaatattacggacccgtggagatggccaaggtgcggcagagtctgccttcggtctggagcgggatcagtcgcgatgcagaggtggcgccggagatcgtcgaagacttttacgaggccgcgagagtgtgcaggctctccaaactgcagcgcgacgtcttcgactacatggaagcccattatctcgagcgcataagcttcgagatgtacggccaaatgttcaacatactcacgttcgccaaggatccgcagaggatgcgggctattttcgagcgtgccatgaccaggtacgaccctgagcaaggtcaggtcccgcccgagatcgtctaccgacttggaattaccgccgctattgcgcttaaagactacgtgggggtgaagatgctggtgcgtgatatggaaacaaagggtgctaagccctcggttgaaattgtaagccgcgtgatggtggcccaagctcaaagtggcgacgcgaagactgtgttggcggccgcggaaaagctgaatccgcaagatggacggaagtggcacgaggccgacatcaaccgcatcattactagtttgggtatcgcaggagagcctgatgcagccttcgacttctaccgaaagtcgcaaatgcgtttgtctccacagacatgcatgaagctgatgctggtttgccgcggaaattcacggcctaagcatgcatttgcaattttggctaaccgccgtcgctttggcctgaaaatgagtccgttccagtatccgacgttgctggaaatcattgaggaactgggtatcgcgggggcgcctgggaatgaaatggccctcattctcaaagagatgcgtgataatagcgtgcagttcaatgaccgcgtgcatgcactgattgctcgtaaccagcagcatctacacggcacagcgttcatgttgacaccgtcgatctcagacgttggggatggaaaagaagatggagtggagttagaagcgcaggcacgaacaaaagaggcggacaagccgctactgcgagagttgctcgactcgcgcaagtttgctcaagctgctgctatcgtcaactcgtacctattgcccgtcagcgacgacgtgataaagggggatagaattgaggaggctaactcggttggagaagaaccagcaattgttccggactggctggcggatacggcgattgaggcgtattcgcagaaccaggaggtagccaaagtgcgctctttggtacgcgggttcatgtgtgttcgtggggatttcaagcatgcgctctctcgcgtggttggcctatttggtggcaatggcaagcagcgcgatagtcgtatggtgtacgaggcctttttggcgatgcaagtccagggttttccgattttccgtgtccgagatgcgctgacccgattcaagcagcatcaagactcgaaggccgctttcaagcttctgatgcaggtatcggggcagattgctgaagctctgcgggactcgaactgcatcgaaaacgctgcgaagcaccaagaagatttcatgcgagtgctcgagagatcgggtgagctcaactttgacccagtgcgtacagtgcgcgatgtgctgcgagtgctcttagcatcgaaagagctgggcatagtattcgccgcgctggaccaacttgcgtcagatggcatccccattagatcactggactatgaaacgatctttagcgccatgagcaaggccaacagagctggcggcaaagtgttttcagttgaggacttcatgaaggtttgggaggacatggctcgacgtagcgtagcccctagcaaggctctgcttcgtctggtgataccggtgctttgcgggaatgataacatggatggcatcagcgacaaaaggaaacgcagacagcttgctgttatagaaggctaccagcaggctgcgaaggatcgtcgtgataactatgtgctgccagtcgcctgcttttcgacgctgctggaatctgccgctgagacgggaagcgtcgaggatgtgaatgcaatccatgctggcgcggtaagagggctgggagcaagcatgaataaaaggcacctgagcctcgcggagcacagcaagatcctggatacgtggcaagcgatcaaatccgagaaggctgcagctgagagcgacgcagctcaagcacgcaccgaaggcgttgagatggtgtaaggaaacttaggagccgaatcgtgagcaggtatcctgcctgctaccgtatatgtatggtgaaagcaggtgtgaaccccacaaccgttgtggggtgacaacggaacgagtttccaggccacaggggggtctgtaggagcagcacgtacgttcaacaaagccatcgacgtagaagagatgcaaacacttcagtgcctcaattgatagagaatagtttatcttcctacaataatcagaagatgccgtttgattgatgatggtggtgacgatcaccttaaatagtgaaggcgctttggcacacctcgttttctacaagtaagttaacccagagtctcgacggacgtgaagaccatggatccgttggagtggacctcgctgctgcagggcgggtggctcgcgtggtgtctccgtcggcgctctttcttctgcgtgaccaactcgaccgtcgatgcgtcgctcccgtgttgcttgcggcagcggagaccaagacgggtcataacctcgtcgaacgagcggcaccaccaggtctccgtccggtacttaatggagccgacgcagccgaagcggccgtcgcgcgtgcggaaggcgtgcatgtgcacgtggtcgatgctgttaaacggcggtgagtggaacgcaaacttgaagtcggcctcagagtcgttgtcgtccgtgcagtcctgtgcggcgtcgtgggccctctctgcctttgaaggggccagcacgaccgaagggcgcggcatttcgcgaagcaccatggcggcgacctcgcgcatgcggcgcagcagcgccgcgtcgtcgggcgtgagcttgttcacgttgcggatgtggcggcgcggcaccaccaggatgtggctgaccaccacgggggccagtgggcggaagacgaccacgtcctcgtcctcgtacaggaagggctcgtcgcccgactcgaggatctcgcagaaccggcaggagaccagcgcgccgtcgaggccgtatgtgacgcccttccgggccactgagaacgtcgaggaggtcgacgacgaggaggaagagaccgaagacggcgaggagcacggggacgagctgtgctgccggtgcttgaacagggactggcggggcttcgtggagacgggggacatgtcctccgtgtcggaccacgagtggttagtgcctgtggcgcccaggatgggcatggggtcgctcgagcgcgagggcatcttggcggcggtggactcgctgccgcgcagctcgtcggcgtccgcctccgtttcgggcgccgtcgcgtgaaagtgcggcagacacgcgcgcaggcgcttccggagccgcgccttcttgggctgggcgccgctgctgtggctgtggctgttgctgctcactgacatgaccgtgagcatcgagaccgtcgtgacctgttcgctgtaaagatgaaagtgggggctctcacgcgcggggtaaagcgacaatgggcgcctgcctcagcgcgccttcctcgcctgcagttacgcggcgtgggactcggacgaccgaatgcagaatgttcagcgcagcgccccgctcagacggatagtccggatcacggatgggatggaaaggcgagcagcaacgggccgaatgggccaaagtaacccaatcggtcgccccatttctcaggaagtgagttttcctttctcaacaacggccggcgtgagcattcgtgagaaaacgagctggtcgttcacccctggatatggaggcgctttctccttgccaagaagttcgtggcgctctaccgctcaaacgcgtaccaacaacatcctacaatcccggcccgccgtgcaaaacccaagcagccgttcagtggacgtagtaggtggacgacggcaaagccgccaaaaccatgaatcggcctaggcgcctcttatctggcgcgcgacgtagggactaagtattcggtgttacagtagtattgtggcttgcagctgtctgacatgtgaaaacggtcggtaatgcagagcatgacaaaggcagtctgatcgtagaaagcgtccactgcttattattaacattgtagcctaaaaccaattggatagcgatatgcactggagttatgttgggcatccgcggaggaaatcacaaggagacgatttgtgcgcagtccatattgtaatgctagccgtgaggctgtcctgaaccagcctcacaaagcagagtcctgtcgagaaattattaacccaatacatgaactgtaaatatacttttttacattccactgcaatacacatgcacattacatgtgcatgtagaagcgtttgtattcataggccaaggcacaaaccgtctggcccacaaattattagccttcaatgcctctgaagagcttcggataaacatccttcgactatttgcatctacagcgttcgatagtgctgcatcgacttgccacagggtgtgttggtacatttcaaacagatacaaatggcctccgtcgtatcgcaaacaacaaggaaatcgtatcgcaaacaacaaggatggtgtatgtttcgtacgaagtaggtcgatggcattcgttcgttttgtagtgcaatatcaagatgggagcgattgtttggggcagccatctgccgacccgagtgtaccatccacatagaggttgaacacgtggaaggttgctcagcagaaggcggctttgtcagcctcgcagttagcctttggcgtccggcaatttgggcccgccaatatgggcaagccattgagacagggctgtttatgggcacctagccgcagctgggggcggtaagcctcgcgctgattggctgatattagtcattttgggcttgattgcgagacggcaaccagggctcggatcaactgctgttcttggtggcgttcgttcgagtgagacggacgcgattgaagctcgcgccgctcgcgcttctggtgagccgggttcgagcagcgaagcagcgtcgggcgtgctcgagactcgctcgccgtggcgataagaacctgcgaggcctcggccagaaatgagggccgatcattgccgcagctggggtttcggccaaaaaatcagctaacgtctatgagccgttcgcgagaaaatgtctcctgacaccgctgccaggcatggcccctgaccaactttggcgctgcaggatggctggggaaggcagggatggcacggagcgcactccgtacaatgcacaacgaacatgtcgtggcaaaatccaagggctgtctattacatggtgctccaacctctctcgtgagacggacgcaggtcaacttcacttgcaaagccgcggccaccggtccgtctcaagcgcactcgtggggcggactgaatgacgaccggccgatcgatcgagcggccaccgctgctcgccgccgccgctaccagagctccgtgacgattagctgtcctgccagcttctgcgctacaatgcgctcggcttcttgctgcgtcgtgatcgcgccgtccgagtactccgggtgtcggagaagagccgaggcaatggccttcttcacggcgcggcccatagctagactcccgcacacgtagatgtagccttcgtacgcaagcaggtgccgcgccacgagctcgctctggtccagcagcgcgtcctggacatactatataaaaaaacatgataacgcacattagtgagtctccttgaagacctgcaacctgcaagttctgctacacaacgtacccgcttcggcttcccgttgtcgcccgaaaactccacatgcagctggttcagcacgcctgagtcccgagcgcgctgaagctcctccgcgtagaggaagtccacgctcttttctcggcagccgtagaacagatatgctggtcggtgctggtgtggtgaagtgccgtcttcatgctcgaggtcctgcaaaaacgcgcggaatggcgcgatcccagtgccggcgctgatgagcatgataggccgatggtcgtggaacgggaacacgaacgaagactggtagaacgacgcacgaatgcagtcgcccggcttcagcatcgcgagatagctggaacagcgtgggagtggcagcgcgtccgccttgcggagaccaagcgtgatcgagacggtatcaggcacaaactgccgcgacgaggagactgtgtagtatcgcggcgcattggacggtgcgatctggaaaaactcggcgaagctcaggcgcaccgaggggaagcgatcaaaaatgtcggcgatggtcgcgtgctgttggggcctacgcatatccaagcagaacgttagcacaagaggaatcagcatataacttatgcacaatttcatctcacctttcagactggatggcttctgctgtttgaggcgccaatagtgctgcgatatcgttttcatcggaagcgtacgcagcgaggctgcgtaaaaagctggggcgtggagtcgagaccaggtcgaatgtccacgttaatgcatcgcgcacagttccagcttgagaaaaaggacgctgcggatacccttgctgctgaaacggagatttccgttgatcatcatcatcggagccagcaatggggtcggctgtataaagaacgtcggggtcctctacgtgcaaatgcaccagcattcgctccacagctgggagatcgttaggaacatacacgccgatattggacgcctgctcgcttacgagctcctgttggtctgcacgaatacagaggtcgatatggcgtactgaacgccacgctccgtccgttgtttggtgtggcgcactgatcacgtcgttcgcagcgacctcaaacaatgctcgatcggcttctgccagcactttccgccgtgcgtctgatagctcttcgtcgcccttgctcgagtaaaatgacaagtcgtactttggcgctggcgcttttggcttttctctttggttctggctctgtaggctgagctcatactccaaaagcttctcctaaataacagccaaacgcatacgcatgagtgcaacgcgttaatcactccaatacgcactcgtgtagtgcaccaacaaacctggtagactaggagcacgcagttggggcaatccaagtggcagcactcgtcgtctttgggctttacgggcggagtcaagggacctaccggcacgaatcgctcaggctaaacacgaaacgtaaagcgtagaagcgcacaaataccacaccatgtcaatactatatagcttgtcacacaagtcatcgcacccaatggttgtccagtgcacgtacgttctcctttcgacgcttgagtgccatctctcgctcgaactccataaaggcgtccatgccgtcgctcaagaagcgccgctgttgctgcgggcgagaatctcgcccgtagattgtttgtgcagatcctctaccactgccgtatacgcttactgcgtgatacgcacagaagcgtccacgacgaagcgctcgcgtcgccaacatgttgaggtcttcgccaccccacgattgcagtcttgactgacggagacgttaaaaatttgtaccacgtttgtggtacacgtacgtcagcagctgaagataggttgaagtaagtgacagtcatgctcgctccaacttggagcatgcctccaaggaggcaagttttatttcattcggtgatgacaccacggtttgatacccgcattaagagaggagagaaatggtttcggcgcccccgcgcacctcacgctgccggttgcggcgagccttggcacgaagagcgagaagcccagcaacgccaaccatacccaggagcaggtagctcccgatgtagtccgacgccttgtatcctgcctggccatccgccatcgtcatcaagctcgcggaagagtggtctttgctgctcttcttctgcttgggcaacttgcaatcatgctcggtgcgtgggttgcgggcgaacgcgaaggccttggagaattcttcaatgtcgcaaagagctgcaacagcaaaaagaggaagtcggcatacacgatttagtgcacgctcggtactctagaaggcaacaggaatgcacccgtcacttactgtcgtggcagtcaggaagctgttgaggctcgccgtggaaaatcatccgaacagcatgagaaccactcttggtcttgtacacttcaatcaccagcatgcctgcgtagggagtccaggtgcgattccagttctccttaacggaggcagccagaaacggcataatagtcgagtcgtgggctgaggatcatagacgaattaaactgttagtgacagatcgacatcgacagcatacgttcgagacgttcatacccatcgtgacggatagtttgtacgcgtccgcgtcaccattcagcacgccatcaagccgcgttagcatatcatgggcaagcggctgcatggcaaccttggcgtaccacgagtcattgtatgtaaggaaaataccctggcgaacttccacctcgtggtaggtcttggtgaaagtctcctcatcgataccgggcggaagctcaagatcgttacagcgggcggtgctgaggcactccaacgctgatccccacgaaaagtttcccactaggtcgttgaagtggtgctcgatctcaacggtggcagggtctcggaggtggttccagaactccggcgactcattggaaagttgtccaatgtgtcccatgaacgggcagatattctcgttggcgttgatgtagtccaccgagatgtctgctacgtcccatgacagcatgcggtgaagctcgagagaaagtgtcccgtcaaccgggaagagcccgtcgattagagcttgaccagaacccagcgtcctctcttgatcgtcactgcggaggtagatctcgctcagctcaaggtgctagcgtttgagacagcagtttcccagatattagatatacattatactacgcagaaaaacattccccagaacagagctcgacttaccgacaaattagcagtgggaaaaagcttcagcggaccatcgcctacgtaggcgtcacgaagaaacctataaaaattgagcacaacaaaaagttgttacggcttgcaaggggatatgtaagtctaactcaaatgcatcaacgcactgtccattggtcttgtgctgctgacgccccagcgggagaagtccgccaatgacgcagtctcccttgaggatgttgtgtccgtccatgtacgatttgcggtacaaccgcccaaagcccttcgtcttctcgttcgggttaatgtcctgagactacaaaaaatgcaatgcacacaacgtcaacacatccgctccagcatctaaaaactcgatatgcgtcgccggcacgtaccgagacggatgtagtggtgcagtcccactcggcgtccatggggttgtgcttgtgcgagtcccagcagaagagcttcgcgtagggtgcgcgcgcaccatggcgggcgataatctgtacctgctcgagcgactcgacgagctccgcctgctccggggtgagcggcgggatgcgcgtggcctcgatgccctccatggcgttgcagtagcggtgcggcgcccagccgtcatacgggcctgccaccactgccgcaggggcgacggtcgcagcggcgaccagcaaggcgaggtgcatctttcggaggaggtgtcgggggcgcggcgccagtctcgttgtgctcgaagctcgataacgggcgtcgctttgaatcttggatccgttgaatggaccgggccaatcagcgcgcacctgacgcacccaccttcaaacagagtggaccacaccaaagtggagccaaaaatgtaccagtaattaaccggttctgatttcgtacctatctgggttttcgcataaaataacggatcgacgctgcacggacacaaacattacgaaagtagggagcaacagcaagcttctcctttacacccctctgccgtctggggggaaggtgaggctctcgtctcaagccacagtcgcgttcacaagaagaggcccccgcccgccgccatggagagcgggtcggaggatgaggagagcgtcgtgttcctgcgcgaggagctgcgcaagaagacgcaggagctcaagcagatgcaggacgagttcgacgagtacacgcagtccagccacgagctggagcaggagctggagcaggagctgtcccgcgtggagaagcgcaactcccacctgctcaacaagaaccagtacctcgaccgcgacctgcagctcgcgcgcagcaagcttgaggaggcgctggaccagacgcgcaagttcgaggacgagctgcaggccacgcgcgcggagctggaagcctctacagcggcctgtcgcaagctggagcagcagcaggatgacctggagacgcaggtgcgcgtcctgcaggccacagagtctgacctgcgccacaagatggagcgcgagatggaggagaaggtgttcctgctcagcgaccaggaggagctgcagcgtgagcacgagctcgctacggagcgcttccgcaccgagatcatggacctcaagtcggagctgtacgcgctacagcaaaagtacgaggacgcgacggtggcgtcggacacgttctcagggaacgacagcatggccacgacgcggagccagtcggaggaagatgacgacgattacgactcgacctacaacgagaactcgcttcgtcactcaacggcgcacgagcgcgacgagattagtcgtgaggtgctgattgagtcgctgcgtgaggagattgaagctctgtcttcgcgtgtgcaggacgagacggacgcccgagcagccgctgaggccgaggcccagcagctccgcgatagtcttgctcacatggaggcgatggaggctgagatgacggagatgacggacgaactgattgagaagtcccaggatattcgtactcgcgacgagcaaatcgaagagctgcgcgagtctctgctgaagctgcaatccgagatggctacagtcaacgacggaggcatcgagcttacaactgaacgcgagaatatgcgcagcgagctggaggagaaggagaaggaaatgagtactttgaaggaggagctggaaacggtgagggcgcagtgtgatgatttgactgagagtgaacgccagctgaaggcccagttggagcaaggcggcgaggctgttgacgaattgaaggatcaaatcgagactctgacgagaaacctcgaggaaagcaagcaggaacgccgggagctagaaagcaagctgcaatttggcaagggcgaaatatctcaaaaccgcagagaagtggaggagctgcatagcttgaacttagatctccagaagcaactggatgaagcgaccaagaggacctcagagctcgagcgagcttctgcagtatcgacagcctccactgtgtcgtcagtttctgacaaggaaatggctgagtcaaagcgtctaatgatggaaattcagactatgcgaacgtcattgaactctctttcggcagagaacgcgaggctgagaaaccaagaaggaatggcatcaagtgtcgtacccgctaagcgcgtttcagctgacgtgctgcaagtcaacttcacgcccgagcagcttgcccggaagtatctcgccgaacgaactcgtaacgcgtcattgctctcccgacttcaaaccgtttgtggtaacattcaagtgttctgccgtgtgcgaccagtcattaacgaagagctggaaaaatcgtggggatcgaagatggcagttaacgtggtgaatcagtcggacttggccgctatggatatccgtcccgatcgttcgttttctagcgattcggacgggcaaatcgtcagcaatggcaacttggaggccttggccaacaacagttcatggaaagtgttcacgtttgatcgaattctgggcccagaagaaacacaaaacgacgttttccgcgaagtggagcctattgcacagtctgttgtagatggcttcaaggcatgcatttttgcgtacggacaaaccggttcgggtaaaacatacactatggaaggaactccaagcgatccgggtctgaactatcggattatcagccatctcttccagtcggtccaactgcgcggcgcaatttatacacctgaacccgagaacaacgaggaccgcgacgatgaaatgaacgggctgcataccgctaccgactcgtctgtttaccacgtacaggtgggagttctggaaatctacaacgactcattgcgcgatttgattaacacgaccaacccgaaagctctggaaattcgccacgattcgtcgactggagatatctgcgttcctgatttaacgatggcgactgtgtcttctcctcagcagacaattgatgtcttacgcaacgcccaaaccaatcgcgtcactggtaaaactaactcaaaccagcacagcagtcgatcgcacagcattgtcatcgtgcaaatatcgaagcgccggcctgagggtgatgccggtgacaaggactcggcagacactgaggttgacgaagagggctgcggcaagctctaccttgtggatctagccggttcggagcgtgtgaagaagagcaacgttagcggtgctatgcttcgcgaagcggctcacatcaacaagtcgctttcggcgcttgccgatgtgatggaggcactggataagaagatggcgcacgtgccgtaccgtaactcgaaactcacgtatttgctacaggatgtgttgaactcatcgtgcaagacggtgatgattgtaaacgtcggtccgaccatcgagaacgccagcgagactttccgatcccttcagctggcggagcgcgtacgcaatatcgtggtcggcaggaaccagattgtgaagaacaaaaaggatatactgtccgcgaagaaggcgtttgccgagctacaatccttgaagcagcagatgcaaatttcgaagaggaagtatatgcagtcacaacagtctgtggttgccctggtaagtcgctgtcggtctgcattccattcgaggaggcatgttttctcacgaaatagttccggtgcctcctctccttcagaaacgcgaccagaagaaccagtcggaaaaacagtcggcagcgctgcagagccggcttaagtcgtgggagacacagaatgaaagcctgaagacacaaaacgaactgctcaagcgactcgtggacgatcttagtggccagctcaaggcagaacgtgaaacgaagcaaaaagaagcagagcagcgcgaagctgcccaacgcttgctccgacagcagagcgccaagtctcgtgtgtccacgtcgcagcaagaggcgcagcagaaattgctgcttgaacgggaggaggagatcaagaagctgcgccaactgcttacagaagctaggaggcgcagcacttcgtcacttatccctcgcttgccagtatcatcgccgcctatgaagaagtcgaagagctcacggccagcatctacaccgggtaacaaccagcaggaaaatgacagtgccagcggcgcaggtgaaccatcaagcgcgccagcttcaagcgctggccgtatcaccaaaatacgcacgggtgctcgtcagtctgcgggctcccgtttacagtccagcaactccgcgagcaatgtgaccggcacagagcccagcccccagagcagtaaacgcacgagctctttgggctcaacgaggtcagtaaggtcaacttccagcttgtcagcgcgggcagctagcagcaagtcgaagcaaggcgtctggaagtaagcagtgcaggggatgttcgtcgagaaaagagcgcagggaagctcttttagaggaagatagagggcagagtgagaaacctggtgatcgatcgtagatcaccttcgtagtgcattcattcagtgagttacgcaatatcgacgtaccagtacgaaattgaaccgacgatatcaaagcagtctttgattgtaagtagtaagctgatgaccaggcaaatgggacgtagtggcaaacaactatgacgacttcgggggatgggaaacgttcccatttgcgcttgaggtgataagaggcatcgctgcattcgtgtactcagccagactccgcagcacttgccggagcaggcccttgtgttggctcacgttgtcaaacacgtgcagcagctcgaagagaatatcctcttgcacctccgtggcagcttctgcagcctcgcgatgcgatggtgacatgaacccgatgttaggcgggttgagaacgcgctccagtacgtcgctgattgccggtttcacaatgttggtgaatgcttcgtcttcgtctccgccatcgtcttcgttttcgatctcgtggagcggggccgccaaagccgacatcgaatcgactgctgcggtcgccgttgtgttaatactggagttggtcgagtacgcatctgctaaacgctcgtcatcatgagcgtcacgagtgttatttgctgcagtagctgcagcctcagcttgagctttcatttcttgctggaggctagtggacgacaaacgaattgtgttgaagtcccagccgctgcccaccgacgcgtctcgtgcatggcgtttaccgctatccctttgtccataggacggtagagtgtcgtcacggcctccactcaggggagggcgataagttctgtccaagtggccgccatatccgttctcaaagtgaccactgctgaagccgctttgctgggtctgtgtgtctgcggccccttggtgaccctgttgctggtcttccaattgattccgatccaaaagctccgtgaggtgagaaatatgcttcgcagaccgaatgaaggggtgctgtagtaactcagaagcagtgggccgatcctgaggagctttttgcaagcagcgagacacgaaatcgacgaaacgggacgagaaagtaccttcaagcacaggcgggtccatcgtcgggatcataaacaacactttcatggggtggatgctgtttttcaaagcaagatcaaaataaccccccacccacgttagcacgacacgcaagagtttctcagagcgaaaaaatccacgtactctgcaagaggaggcgctcccttggccatttcgatcgcggtgattcccagggaccagatatcggccttgaaatcgtactcggactcctggatgacttcgggtgccatccagaacggcgtgcccacagcggtgttgcgcttcgtcatcgtctctgtaatctgacccgtgacaccgaagtccgcgagtttcacgtgaccgtccccgctcagcagcacattcgcagccttgatgtcacggtggatcttcttctccgagtgcaggtactccagacccttcagcagctcccgcaggataatcgcaatgaatgcctcatctagggggccattgcgcataatatccagcaccgagccgcccgacagaaactccatgatgatcctgtacaaccattttatctatcagcttatgcttcagcttaccaaacgagagaaacaaccactgcgtgacccaccagagcttggtccccgcaatgaacgagcccgagtacgtcgtgagctggtcgcatgagcactgcgacaacacgtggatctcctgctccacacaacgcacacataggccagtcattggttaagattaattcaacgcctccacgttgacagggaattgtgccgtcacctgctgcacgtcttcgatctcgtcggctgcggactcgaggtcgatgatcttgatggccaccacttcgtccgtctggacgtttagcgccttgtagacctgcccgaacgcgccgccgccgatgcgatccagcagctcgtactgcacggtcgggtccagagtgccgctcatctcgcaggccactcgcaagtcttcgcgccgagttcctgcgcgttcagtaatggagctgcgtgatgctcccccactccttggcacgcacaccgaaatttctccatcacacttgacgctctatcattggttctctaaaacgaatatcagattggagctgctacgcgactggctggaattcacaaatatcagactggtctaatttttggcgagaccaatttttgcagccatctgctcgtagtgcgctgccagacgctgatactcggcctcgaggaaggccttccgccgctcggcgctgcccatgccgtccaattcctccgtgtgcaggcggaacagccgcttcttcacctcgagccgaaatttcttgagctgcgcctcgtcgctcgggtccacgaacgcgagcttgcgcgcctcgtagcaggtctgcacctgcttctgcgtgagcttgagcttctcctgcacggcgtggatgtcggcggtcgtcagcgctagcgccccgcgcccagtgccaccagcgtctgcgctgtcctccggtgccaaggagaagaagccgtgcttgacgcagttcttcaggtccacgaggtcgcgtagctgcatggacacaacgccgagatattcatgagccgaaacatcttgcctacccgaaggcaaataatcggcacgttgcagaggggttacgtacactcgagaaagcgggcacggggtcctctactgtgagctcgtaaacatgatcgtttccaacagcttgcgtgtggatgcagtgcaccagacgctcggcgtgccctgcaggtacggctgaattagatgcgtgactccacgggcacaaccttcagatgcacttaccttgacgctggtacgtagggaagatgagagcttggcaaatgcggtgcgtctcattttgggcgggtttacagtatgcggctttgcgtccgagcgggttgaagaacttgaagacagtgatgaaccccacaggacggaacgccccactccctgcctccgcacgttcatacagcagatagacaatccacctcgggtccgcgacgtctacagcatccgctcctacgacatcgattacacaacgtatcgcgagcaaagttagcgtcaccaaacatcgacaagctgtaaactcatcggtcgaccaaccttcgacgaaccacagcgacagcgtctgcaagttggcgagaagcttctgggctggctcgttgtcctccagcttgcattcatagatctcaaagtatcgatctgcttgtatttcctcgccctcttttacccgagctttggtagtatatgtctcgatgcgcttgccgggcgggccggcgaactcggccgctgccttgcgcagatccgcaacaaactcgtctttatcctggacgaagccttccggcagcgatggcttcaactttgcaacgacatccactgccctacactcgcaaatgcagccacagagcgttagagaccggagtctgcagacgcacacgcctcaaatgccagaagatcgtacgtgtccgctttctccttgaacttgacgtccagcagcgcgcggaagtcgaatccattgaaaacgaccgacatcttgaggccttcgtagccatcgacagcttcatcggtaccgaacgcgtggtacgtgaacttgggggcgaaccactcgagcgtctgcgcttcaacttggtcggcgtcggttgctgcaggaagagctctagctgttaatagaggctgcaatatgagaggagcagcggggtgcaattgcaattctcacgtaccgatagcgagtgaggtcgcttcattggaggataccgagcacgcgaagcggacgcgcttcacggcgggctcgtggtgctcctccgccggccgcttggttgctgctgcttcggtcggcgccatttgtgctcgaaaatcaatcctactggtacctaggaaacggtaccaatgtgtacgatacaccattagaaacgctgccaatttgtagatcacaccaatagaaacgtctcttaggtggtcacataatttcctggtagtcaactaggtcttcctggaatacaaatgaaagggggagatatcagccaaccgttttttttgctgaggcctcgagcaaggccaacacaacagaatttgccgtcgatagcctcagttgatcggtgaaggcgcacaactcctgttcttgtgttcggtacatgtcgatgttctgtgtgtctccgttggattaaaagtatgctcgccaacttagccttgggcaagcagaagtcgtacgacggaatagcgagtgacacgatcacggcgactttaaaccaagcgcgaactctcttgtgtttgcgacttgacctgtctcaacgctacatctcactgcattcgtaggaagtaggcgcagtagctagctgaagaaagctctagcagtaccatagcatgtagatgcatggattccagtgggcttatcattttcctggatttaggcttgccagtgcaccacttgcccttttccgaagcgaaaagtattgatgcagcagtcgtgcatgcggcggcagctggtggtcgactacaccaacatgaacgaacatgctggctgactggaataactcgcttcggacttggaagtccttgtgagctcatagcgtccgcccaataaaagctttgtgactggagtctgcgtctcaacacctcgcaacgtgaagttgctagtggagcaggcaataaacgccctctgcgagggcggcggagcgcggtgccgccgccgacacagagatggagctctcccgttcaattgtagtccaccaccacaaagcgcggcaccgtctgcttttacctttcccacaacccgcactcacgactgtccgcactccgatattcgtcactctgcatcccgccggcggccatggggatgatctgcgtgaaccagaacgaggagaccaacctcaccacgacgagcacgcctcgctgcgtggccgactgggcgcacacgcaggagcaggtggtgcacgcagcctacctgctcgccggcctcgtgctcatcgcgctgctgtggacggccgcctcgcgccgccagcgaaagtccctacgcaagggcgagctcggcttctcgctcaactgccgccgatgggcgcgcacgtcccgcgccgccgccatcatcgtacgaacgagttgcaatgctagtatacctgttgtctgtacactaccagtcagctgatcccttcgctgtgaactaactgttcgagcagaaccgaccggtgcagttgctcgtgtccttcggcatcctggggctcaccatgtcgcgactcaactcgtacgacgtgacggagtggtcctactacacggtgctggggctctacgcggtggccatcgtggacgatgtggtgcgcttcctcgcgtcgcggtacaagcttctcttctgcttctcgcccctcacgctgctggagttgctgtgtcttgcgtcgaactttggcgtgggctttgggtccgtcaaggtcattggaggcgtgcggacgcgcacgtacttggacttctccgtcatgcgcccggtgtttatcttgcggagctacctggagatggagagacacgtcccgaggtcgacgaaaggctggatgatggtccgacttggcatcaagatcctactcatgatcatggtcggcgcgtcgatcatgttcttctttgagacgcttggggaaatgcccttcttcaccgacaacggctttgcccacttgtacagctgcagtgacggatcagtgacaagggtcgagtctagcgagtgctcggatgcaacctggtccgtcatgtttgcgttctacttcactgttgtggtacgtgcatttacttgtatcctggaattggttgaagctgcgcaagagtatgctaagtgttgatttttccctgttgtagacacttggtacggtcggctacggcgacaacgcaccacaaacagtacccagtcgactcctggccattatgttcattgtcatgggcatcattttgttctcgatggagattgacaacctcatcagcttgtacaagttgcgccagattggaaaccctccgtacacacccaagctcgactccaagcacgtgctcgtgatcggtaatccttcattcgctcagctgtcggcaattctgcgagaactattccacgctgatcatctgagcgataccgacacgcagcagcttcacgcggttgtgctcggtgagcggaattccaagtttacgaagccgcttatcgcgaagctgaagggggaccccatcttcgcatctcgagtcacgtacgtcgccggcaacgcaacacgatcagaagatctggaacgatccttggcacgggaagctagggcggtatttgtgtttcctgacaagctcacgggcgatgctgcgacggaggacgccatgaatatcatgcgtgtgctcgcaaccaagcgctacgtggggtgagtgatgatttgttttatctcattgggctcagtttcaatgtgctgacttatttcccttgtaggtcatccgtgcgctttttagtaatggtgcttcgtgctgagaacgctcggcatatgctggctgctggcgtgcacccagacgacattatctgtgaaaatgtcatcaaaatggggtctctagctcagaatgcggtctcgaacggcatctcgacaatgctgtcgaaccttggatccagtctctccgttgatacaagtgaagacacaaccgagagctcgactccgctacttaatgtgatcggcaaagataaatctatgggcgccgacatcctgacgaccgatgttgctgagaaggatctgcctgagcgcagctggatcaaggagtactacgcgggcgcagcaaaagagatgtacctgatccacctatcgaaggcacgtgcctttcaaactgactgcagactgccgaaatctaactgtttgcttgtattgccataactagaaatacgccgggctaacctttgctgaagccgcaataagggttttcaaagaaacctcaggtaccgtcctgctgatcggcgtggaggtcatgttctccgatgaagactcagggatcaacgacaacgtcgagtcacgtgtgctgctgaatccgggagaaagtttgctcatgacggagtggatccagtgttattgcatcgctgacgatctcgatcaagtattcaactacaaaatctgcccaaaggaagtgacccgcgaagacatgcggcgcccaggcagcacttcaaccttcatgaaccccaccggggacgtttatcagccgatgctcactgctaccaacgatgatgatctaccctgtgacgagctcaggagcttaacagcgtacaccgcgtacatgaccccaaattacgagtccatgaagcgccgcagcccagtaagttcccgggtccttactgatcaaaagtgtttttagctcattttatcttgacgtgctcgctttgtcagctgacaacgtcaagaactggatcccttgttctggtgcgatcgcgagtacctgccaagtgtatttgctggtatctaacttattttttttttctttcttcttttcttttataaaccaggaccgctcgctggagagtatcgctctcaatttcaggaattgtaatcgcaccattacgagcggcaacccctacgaggtttctcaaggtcaagctggataccacagcggggatgtggctcggaattctctatctgcatcggtcaacaacactctgaaaacacctccactcaagattctcctacaccctgatcacatcgtgatctgcagctttttgggcgaagaatcactcgaaagcttgcagtggctcatctggcctctccgcagcccgtatgctaccagccagccaccgattaccatcctagatactgccgagccacctcctacgttgatgcggatgctgtctcctttcaaaaatgtggtacgtacgcaaatatggggttcagtttactctgtaaatctaactcggggtgtattctacagtactacgtgcggggaagccctctagtgtactcagacttgcaacgcgctggtgccaaggctgcagccgcagtcgttgtcctaggaaagcgagcgaaaaccaccatcatttctgaatccgcgcacgatgctgaattggagtcaagcatcgccgatgcggaggccattttcgcgacgatgcttgtggaactgaagatggacttttcaaagatcttcgctgtgacggagctcgctgacgaggccaactcgaagtttatgggcatgtcatttcagcttaaccagctccaaacggtgttgccaaccgctgaacggggaagcagcgggattgcagtggacttctcgggcttggagatgctgaacctgtgggatagtatactggagcacgacgcgcccgagcaaaaatcggagaaggagatttttgggctgcctctctacatgtccggccggatcctccaccctgagctgtgcgagaacatggtcgtgcagacgtacttcaatccgtcgattcacaagattgttcgtcaattggttggagggcctcgctgtacaggcgtgattcacaccttctcggtcccgcgcgctcttcgagtacgtccaagattgtttgacttcatgtgcgtacggacttatcttactcacttgtttgatttctgtgcttgtttttaggaggcttgtacgtacgcagacgtcttccactcattcgctgggtcttcgtactcgggcatttgtatcggtatttaccgcatgtccactcaagcaatggggtcatcgaaccacgtcgaactccccattgtcatcacgacaccgaaggccgatctcaaaattctgagcaccgatcggttgttcatcttgatcggagcgcacacgctggagcgagcggcgacaaggatccagaagcgctaccgagagtacaaggggatttcctgatccctcgaacaggaagtaaaggcactgaatgaatgtattgggtgatcatgcatgttttttaaggcaaaaagtgaaccaaaaaatgttatgcagtctattgtttgaacgtctatggagaacatcccgatggcgtagatcatcatgacctgcggccctttttcctgcccgactgtttgcctcccttcgcgtggcctgcagctgcgtgtttgcgcttgttgttgcccttgttcttcttgttgttatcgttgttgttgcattcactcttgcccttgttgctgctgtcgccatcctgcttgctaacaatcttgggaaccttgttgttgttgaagcccttcctcttcttcttgcccccgagcatgtcatcaagcgatggggtcaacagcaagtaaatcttcttgagggtgtccatcgtgacaggctcgacaggaacggtgttctccttgtctccagcacccttggcgtcggcgccttcagcttcagctggcgtctcaggctgcgcgcggtcctccggcacgaaaatgaacgtctgcgagtcccagatcgggaacgagcccttcgagagcaccttcttgttcgagtagcccgggtacaggcaccgatcgaagatgacagactgctggtgacgcagcttgttggtcttggcgatgttctcgatgccccactggccgaacggcgccttggtcttgtgcgtcacgtgcacctcacccgtgggcgtgagcatctgccccacgtgggcgaagaagccgtgcaggagctgcttgttcatctccatctcctggttctgtccgtcctctccgcgcggcgcgcgcacgcacgggaagttccagatgacgcggtcgaagagtccgagctgcttcatctgctcggcgtccgtggcgtccacctcgtgctgcaccgtcacgtgcggcatggcgttcagctcggcgaggatcttctcgccgtccgggtacgtctccagcaccgtcttgttgctctcgtgcgacgtggccaccagcgtcacgcccgagtcgggacccagcgcgcgcgcgagcgccagcgagtacgagaagttgccgtcgcccacggtcaagatgcgctgcacgtgcttggcgtcgaacagacccacgcagtgctgcgtctgcgtctgctgctgctgctccgtaggctcctgcgtgggcgtgtcctggtcagcatcgctcgacttcttggaggcggcggccatgcgcggacacatctccgggcgcacgttgggcagcagccccgggcggctgtgcagcgcgatcttgtagcagcaggcgatgcatcgcgtgaaggcgcagcgcagcgtgtcgcggtgcacgtgcagcaggtgcaggtcgcgccactgcagctccgagcccctggcgtccatggctttttgtgtcgatgattgactggcgcaaatgtatgtacaaggtatgtacacaatgtggtgcacaccacacttcaacgtgtggagaaaaaacctccgaggtttttcctataaatcagacgggaggggatttccccgagccgagaagctcatcttacactacacgaggcgccgcgacccggaggaggctcttctcgccaagcgaagctcgacttgaccgacacctggggccgccatggaccagctgatccccatcatcaacaagctgcaggacgtgttcagcgccatcgggcagtcgcccatcaacctgccgcagatcgtggtcatcggcagccagagcagcggcaagtcgtccgtgctggagaacatcgtgggcaaggacttcctgccgcgcggctcgggcatcgtcacgcgccgcccgctggtgctgcagctgtacaactcgtcggccacggtgcccgtcgtcgccgaagaggacggcgcggaggccgccgacgagtggggcgagttcctgcacctgcccgaccagaagttcacggacttcgccgagatccgccgcgagatcgagaaggagacggaccgcatcacgggcaagaacaagggcatcagcaacaagagcatcaacctcaaggtcttctcgccgcacgtgctcaacctgacgctcgtggacctgccgggcatcaccaaggtgcccgtgggcgaccagcccgtgaacatcgaggagcagatccgcgacatgtgcaccgagttcatctcgaaccccaactccatcatcctggccgtcacgtccgccaacacggacctggccaacagcgacgcgctcaagatggcgcgcgagatcgacccggacgggcagcgcaccatcggcgtgctcaccaagctcgacctcatggacgacggcacggacgccatggacatgctgcagggccgcgtgatcccgctcaagaggggctacgtgggcgtcgtgaaccgcagccaggccgacatcaactcgcagctgtccatccgcgactcgctggccaaggagcagaacttcttcaagacgcacccggcgtacagggccatcgcctcgaggatgggcacgcagtacctgtccaagacgctcaacacgatcctcatgcaccacatccgggactgcctgcccgacatcaagtccaagatcagcagcatgatctctgacctcgatcaggaactcggcgagatgggctcccccacggagcaaatgtcgcccacggaaatgggcggctgcctgctgaacctgctgtcgcacttctccagcaacttcaccaactcgctggacggacgcaaccaccagctcgtggaaatggacgagctctacggcggcgcgcgcatcaactacatcttcaacgagatcttttccaagtcacttcgtgaggtcaacccatttgatggactcagcgacgaggacatccgcaccacgattcgcaacgccaacggcccgcgccagtcgctgttcgttccggaagtatcgttcgagctgctcgccaagcgccagatcagcaggttggagcagcccggcctgcagtgtgtagaccttgtctttgacgagctgcagcgcgtgacgtcgcagtgcgagacgatcgagctcacgcgcttccccgagctgcgcgaccgcgtcatggaagtggtcaacggcatgctccgtgcttcgttggtgccgacgcaagctatgattcagaaccttattcagattgagttggcttacgtgaacacaaaccacccggacttcattggcggtagtcgcgcggttgcacagctgatggagaagatgcagcgcgagacgatggcgtccgcgggagcccctaccaaccaaatgattaaccaggacccgcgccgcgccggacagccagtaaagcaaagcgccgctccagctggacacgctggcgccgctgaggagaagcaggaaggcaacggcctgctgtcgttctttggtggcggtcgcaagaaaagcggcgcggatggcgtcacgagctcaaagcctgcagtcgtcaagcttcctcaggtaccagtgagcatgcggcagggcgatgacccgacggaccgggaacgcatcgagacggaaattatcaagagtctactcgcgtcttacttcgatatcgtgcggaaaaacttcctggatctggtgcccaaggccattatgtgcttcatggtggggcactcgaaggagaatattcagaacgagctcgtgtcatccctataccgcgaggacaagctctcggagctgttggccgagacgggcgacattgctgcccgacgctcgaactgcgacgagatgcgaacactactccagcgcgccctagaaattgtgaacgaggttcgcgacttcaatacgtttaagtgaagcggtcagtggctgcaagtaatcaaggctccaagagagtagaaggtaggtagagtgcggtggttcaagaagtagctccatttcgcgtggcatcatctctcaaaaacactttccgtttgccttatacctagttctttgccgcgctgtattgtgttgtgtatctttgtcgataatctatctgctagcggaatgaaaagtctgatgcaggcgttcctatgcgtacttccacaccggagacggattggtctccatcactcacagcactggggtccttcttaggcgcgtccttgtcggtattctctgtggtttccgtttgccgttgttccgcatcaccgaatatctcgtcaaactcctcatcgtacttgtcaagctgagctgcaacttcagaggatgcattcgcattttcatcaccagtggaagctgtcccaacagggttcgccggagcatcgccaaaaatctcgtcaaactcgtcgtcaaagctaatatctcgtgctgccttttcagaagaagtggcggcagcagcctcaaactccgccatgacgaccgagtcctcgaactccatcgcatccgagaaacctgcgtcgatatcaaaatcgatatctggcttcgcggcagcttcattacagctagagccatgcccggatgccccaccaagcttcatatcttcagcaggtaagccaatagaatcgacggtggcggtctcctccgtcgtgctcaccgaggtggtcgtttcgtgcgtctccaccgtgaagctggccgtcgtgccagcctcgccggccaccgcgtcgccatcgaacgcggacgagtcaccaaagtcgccaggccgctctgctgcggcaccgaagtcgggtgctgaagattcggcgggcgggccgaagtctgctgccgcaccaaagtcagctgccggtgcgtcaaagtctgctgccggtgcgtcaaagtctgccgccgcaccgaagtctgctgcgggtgcgtcgaaggtggcggtctcctccgtcgtgctcaccgaggtcgtgctcaccgaggtggtcgtttcgtgcgtctccaccgtgaagctggccgtcgtgccagcctcgccggccaccgcgtcgccatcgaacgcggacgagtcaccaaagtcgccaggccgctctgctgcggcaccgaagtcgggtgctgaagattcggcgggcgggccgaagtctgctgccgcaccaaagtcagctgccggtgcgtcaaagtctgctgccggtgcgtcaaagtctgccgccgcaccgaagtctgctgcgggtgcgtcgaaggtggcggtctcctccgtcgtgctcaccgaggtggtcgtttcgtgcgtctccaccgtgaagctggccgtcgtgccagcctcgccggccaccgcgtcgccatcgaacgcggacgagtcaccaaagtcgccaggccgctctgctgcggcaccgaagtcgggtgctgaagattcggcgggcgggccgaagtctgctgccgcaccaaagtcagctgccggtgcgtcaaagtctgctgccggtgcgtcaaagtctgctgccggtgcgtcaaagtctgccgccgcaccgaaggtggcggtctcctccgtcgtgctcaccgaggtcgtgctcaccgaggtggtcgtttcgtgcgtctccaccgtgaagctggccgtcgtgccagcctcgccggccaccgcgtcgccatcgaacgcggacgagtcaccaaagtcgccaggccgctctgctgcggcaccgaagtcgggtgctgaagattcggcgggcgggccgaagtctgctgccgcaccaaagtcagctgccggtgcgtcaaagtctgctgccggtgcgtcaaagtctgccgccgcaccgaagtctgctgcgggtgcgtcgaaggtggcggtctcctccgtcgtgctcaccgaggtcgtgctcaccgaggtggtcgtttcgtgcgtctccaccgtgaagctggccgtcgtgccagcctcgccggccaccgcgtcgccatcgaacgcggacgagtcaccaaagtcgccaggccgctctgctgcggcaccgaagtcgggtgctgaagattcggcgggcgggccgaagtctgctgccgcaccaaagtcagctgccggtgcgtcaaagtctgctgccggtgcgtcaaagtctgccgccgcaccgaagtctgctgcgggtgcgtcgaaggtggcggtctcctccgtcgtgctcaccgaggtggtcgtttcgtgcgtctccaccgtgaagctggccgtcgtgccagcctcgccggccaccgcgtcgccatcgaacgcggacgagtcaccaaagtcgccaggccgctctgctgcggcaccgaagtcgggtgctgaagattcggcgggcgggccgaagtctgctgccgcaccaaagtcagctgccggtgcgtcaaagtctgctgccggtgcgtcaaagtctgccgccgcaccgaagtctgctgcgggtgcgtcgaaggtggcggtctcctccgtcgtgctcaccgaggtggtcgtttcgtgcgtctccaccgtgaagctggccgtcgtgccagcctcgccggccaccgcgtcgccatcgaacgcggacgagtcaccaaagtcgccaggccgctctgctgcggcaccgaagtcgggtgctgaagattcggcgggcgggccgaagtctgctgccgcaccaaagtcagctgccggtgcgtcaaagtctgctgccggtgcgtcaaagtctgccgccgcaccgaaggtggcggtctcctccgtcgtgctcaccgaggtcgtgctcaccgaggtggtcgtttcgtgcgtctccaccgtgaagctggccgtcgtgccagcctcgccggccaccgcgtcgccatcgaacgcggacgagtcaccaaagtcgccaggccgctctgctgcggcaccgaagtcgggtgctgaagattcggcgggcgggccgaagtctgctgccgcaccaaagtcagctgccggtgcgtcaaagtctgctgccggtgcgtcaaagtctgccgccgcaccgaaggtggcggtctcctccgtcgtgctcaccgaggtcgtgctcaccgaggtggtcgtttcgtgcgtctccaccgtgaagctggccgtcgtgccagcctcgccggccaccgcgtcgccatcgaacgcggacgagtcaccaaagtcgccaggccgctctgctgcggcaccgaagtcgggtgctgaagattcggcgggcgggccgaagtctgctgccgcaccaaagtcagctgccggtgcgtcaaagtctgctgccggtgcgtcaaagtctgccgccgcaccgaagtctgctgcgggtgcgtcgaaggtggcggtctcctccgtcgtgctcaccgaggtggtcgtttcgtgcgtctccaccgtgaagctggccgtcgtgccagcctcgccggccaccgcgtcgccatcgaacgcggacgagtcaccaaagtcgccaggccgctctgctgcggcaccgaagtcgggtgctgaagattcggcgggcgggccgaagtctgctgccgcaccaaagtcagctgccggtgcgtcaaagtctgctgccggtgcgtcaaagtctgccgccgcaccgaaggtggcggtctcctccgtcgtgctcaccgaggtcgtgctcaccgaggtggtcgtttcgtgcgtctccaccgtgaagctggccgtcgtgccagcctcgccggccaccgcgtcgccatcgaacgcggacgagtcaccaaagtcgccaggccgctctgctgcggcaccgaagtcgggtgctgaagattcggcgggcgggccgaagtctgctgccgcaccaaagtcagctgccggtgcgtcaaagtctgctgccggtgcgtcaaagtctgccgccgcaccgaagtctgctgcgggtgcgtcgaaggtggcggtctcctccgtcgtgctcaccgaggtggtcgtttcgtgcgtctccaccgtgaagctggccgtcgtgccagcctcgccggccaccgcgtcgccatcgaacgcggacgagtcaccaaagtcgccaggccgctctgctgcggcaccgaagtcgggtgctgaagattcggcgggcgggccgaagtctgctgccgcaccaaagtcagctgccggtgcgtcaaagtctgctgccggtgcgtcaaagtctgccgccgcaccgaagtctgctgcgggtgcgtcgaaggtggcggtctcctccgtcgtgctcaccgaggtggtcgtttcgtgcgtctccaccgtgaagctggccgtcgtgccagcctcgccggccaccgcgtcgccatcgaacgcggacgagtcaccaaagtcgccaggccgctctgctgcggcaccgaagtcgggtgctgaagattcggcgggcgggccgaagtctgctgccgcaccaaagtcagctgccggtgcgtcaaagtctgctgccggtgcgtcaaagtctgccgccgcaccgaagtctgctgcgggtgcgtcgaaggtggcggtctcctccgtcgtgctcaccgaggtggtcgtttcgtgcgtctccaccgtgaagctggccgtcgtgccagcctcgccggccaccgcgtcgccatcgaacgcggacgagccgaagtcgcttgaccaccctgtattgacatcagtgttcaagggggacgaatcggttgtggttccgtccccccatgatgcaaacgtagtttccgttccgtcaggtgatgaaaagtttccgaagaaagtatcgtttgaactgctcacttggtccttttcggtatccttagaatcgctctcccagttgaaaaaggatggtgtacttgcagttgcgaatgcagttgcgaaggtgtcagtgctagtgctgctcttctcatccacgacgtcattattcacccaggaatcaccactgaagaaactatttgctggggtcttgaagtcgtttacggaagattcgtcagtcttactcctcagatcggtatccttccaactggtaaaatcggatgctgcctcactcttgcttcgaatggcatcagcaaaaggatcatcaagggtcttagtttccgttgctgcatcaggagctctgaaatctgaaaatggatcatcatttgtgagagctgcagcatcaccagctcttgcatcggaaaatggttcggtgtcgagagaaagtgattggtttttggactcttctccacccgctgcggactgctgcgatgtcttctgcaagaagcccaaagtcgaattgacttgctgtgagagcggagtgaacccttgaagttgtgcttcatcccgcagctgtgagagagctcgaacgcttaatcgctgcgatgtgcaggtttcgagtagcgcctgcttaatgagacgcgaaataaggggagaattccacaccttgttccgaacagcatatcgcatccctccttctcgatggcttaggaattgcatagcactttgcttcaccacgaggctgtctggggccgcgctgtccgtaggagcacactgaaagtccagaaggtcgttaatgcatgaaaacacagtgtctcccaaggtcgccaggcactctcgaagtgccgtataccaaattgccgtcatcagagcagcttgccagacacaaggccgcattcgaaaccacgcgagcactatgcgaaggcatccagcaagcaaagctgtctccacgccatacccatacgactttggtgtggtcacgcaacggcgaaataatgtccaggcaatcgcagcccggcgttctggctgaattcggttaaacggaagtgcctcaagtttccaaaagaggttcgcccagtcgtcttggttgggttcgacacgtccgctactacgccgtatcagccagacataggcacgaagagcctcgcaagctataaatgcattgctgtgctccgtcagcgagcggatgcgagttgtaaggttgttcaagtaggctggaatctccatcgtctgtccagacgacgcacccagttgaagtacgattgtatcgagacgctcagctacgaattgcaccgcgcggcacacacgatgcaacgtgaccgtactgaaggctggtttagctggcgtcggaagcaggggcagcaaggcagctgccacaagctcaaaaaggcacgctgagccccaattcggctgcttacgaacactcgcctccggggaagttccacgcagcacctcctcgatagccactagaagtacagcggggggtgccatgcccttaacgggcgagccatcggtcgcagcaccttggacaatgtcggtaaagtagtcctgtagctgcgctgagagtgcatttgagatgaaaaatccttgaagagctgggttctggtcggtcgatagttgacttgtaccagacgatgtctctaatagtgtcgcgtcgggatttgggccagggccgttcgcaaaggaatgctgctgctgctgttgctgctgctgctgctgctgctgctgttgatggactggaaatcggtacatttgaccacacaggcgcagcaggtacacagaagtcagggaatcgccaccaagtaacgtacgcgggcgcgctttcagcaagtacagctcaatcgccttcgctgtcgtcattgcattcgacggtctgtcttcattcaacgaggacgacgtcaagagtgacagcaacgtttttgcagcgtgtcgagagggtgtacccgacggcatcgtgaaggcgagttgcaccaatttatccacggcaaacacttgctcatcctgcaccacatggaacctcagtgcatggcaagctcccgccacagctccaaattgtgcaggtcccggtggagcgaccttcttccccttagcatccactgcatgttcagccagtaccggtgactgctgcagcagcgtcgtcgcaaaagtcaccagttgctcccttttgcggaaaacccgacacagttgtgcgtacactcgtagagtggctcgctgtctgggcagtaacagccctgcgggcgtcgtcactgccgtctccagcgtcaccaggaagctgcttaacacttgctctgctggatcgacactctgctcttggttgagcttctgcgagtccgtgagtctggctgccacctccctctggatctcgaactggtcgatgagtcgcgcgaggagacacagcgcgatgcgggcgatacgctggtgctcgtccttgaggagaaccatctccttcttgtccttgagctgcggcagcaggctgcacagcccgctgagcagcgactgcgggatgcgcgagccccgcgccgccgacgtgtagaagaaggtgagcgcgcgcagtacgtccgccatcttgcgcgacgccacgtccttggcgcccagcaacttggccagctcattcagcagctgctgctcggacgagcatttgctgcgcaggtacccgttcatggccgctagtgcaggacactgggcgagtaaatgaatgcggagtgcggcggctgtggtgaaggatcgcgtcgcttcaagatcggtcagtagggggtggcccctagtgacggccgttacaaaatagtattgacaccgttatcggtgacctcagcttctcctccttcatcatcttcttcttctttatcatcatcatcttctcctgcttgtccttcttctcgtttttcttcagtatttttatcatcgctaccaggtcgttaactaagctgaagtgccgttggctcacttgccctcgtcgcgtagctggatcttcatgcggtcctcgtagctctgcttcttcttctcctgcttctcgccagcggccagcgcagcacctcccgcaagagcgatgaccgtggctgtctgtgccacgacacgcgcctgcatgaacttgttgcccagcttggattggccgcgctggaaggtgatcagtccgcccagtagcacggccgtggtcgccgcacagccgagcggcacgagcgggtcctccttcacgcgcgtccagagcgacttcttgccgccgtagcgctcgtcctccatccagctgaagtcgcccgccgcgtacacgcgcgggggctcggcagcgttgcgatcggcgggcattgcggcgacgtctacgtcggatactcaggagcagttcaactatgaaatctgaggtcagaatggcattccgccgtttcaggtcgcttttgattggacaatataggaacgaacgcatctgattggtcgagcgcatgttaaacacgcagcagctcaagagaccaagatggacgccatcttgcagtacgcctcctccccgtcgccgccgtcctcgccgagcaccagtggtggtaatccaacaggtacaacaggagcttcagcgccctctatgtctctccccgttgtggcaaatgaagacgagaacaggcgccttcgcgttgccgagcgactggcaggccagcgtcgagcctttgcccatcaaagcacgagagaggaagacgccttcaagttccgcggctacgcaagcaagaggcgacggcgacacgctactccgcctattgtcgcctcaggcgagctggatactagaggctcaagcaacgatctgcctttgttcgagagaagcgacgaaatcccaagcatttcgactacggattccagacacaagacggtagctccattgcggaaaagagaccggcaacggtttattggccacgacaaggcagtgaacgagttgcaatggcacccgcaatattcagacctctttttgtcggcgtctatggatgctacagtgcgagtttggaagtgctcagcagaggagcgagagaggtctcggcgtgagctgacgcaccattcgctcggggtcaaacgcgcgaagtggtcgcttgacggcaggcaaatactttcaggtggatacgacgggctggcgtgctgtgtggacactgagactggtcaaacccagcaggaactgcgacggcctgacacggcgatcccctctgcaagaattgagcgcatcacaagcgcgtgtttccacccggttgagccaaaatcactgctccttgggaccgatcaagggaaaatttactgtcatgatcttcgcgagaaaaacccgctgcatgcagtgacgacatacacgaaatcgtttggggacgttcacgacctgcttttcctcggtgatgaaggccagcggttcgtgtcaagtgctggtgtgatgcagagggatgctagcaatcagacgctgttagtttgggactggcggtctgctacattactctatgaccgcctcgacggcaatatactggcgcattcttgcttacgagcacatccgaacaggccgtacttcgtagctcaatgcaccggcagctatgcgacgctgtattcgtcaagtgctccatacaagtgcctcaaaggccccagtgttggcggacgtcgcccaccgcttcgtttttcaggcggacaccaagttgacggctatagtatccaatgcagtttctctcgcgatggcgaactctgggcaacgggtgactcaagtggacgagttgcagtataccgcacagcaggaaagcgcgagctgatggatagctttcagctctacgagcgccgaacagcctgtatttgtgcagagtttcaatcgaccagcatcgattcgaggcctatgttgctaactggcagcagtgctggtgacattgacctgtttcgctgataacttactgtgaacgtgatcaacttcattggagcttcatcgttctgtttactattattacgagctctcttcctcatgatggtcatcatcgtcgtcgtcgccttctgcggcgtgcttgtactgcttggccttagccattgcctcggcagcacgaagtttgtgctcaacgttagcgcggcgtctatcagttcgcgggagcaatttgcgtgcagttgtgtaatgctttacggcttcgctccacgcttcattcggcgttaatacactatcagcgtaaatcaagtgcgtctcccagttcttcggacgcagcttgaacgaccgctgaaaagctgcaacagcctgctggaaatctcccaaagctgcaaatgtgcgtccatacgtgcacatcagaatgctccagctagttttctcgtattcgggaacctcggacaaggcactttccacaatcgttttagcacgttccgggtccaacggtagctccaacaaggcgcgcaagttccacactgacgcatctgaaggatcaatcttcagtgccttttccagtgctgcacgggcggctgggaaccgccgattccgttgctcaatcttggccagctcgatcagcagaggtgcgtcattgggtacatgctggcttgccatcgtgagcaccgagcgcgctgcttcgtaattcttcaaccttgcctccacacgcgccaacgctcgccacgactcgataaccgtaggctgcaccttcgtcgcctcgtcgtaaagctcccgcgcgttgtcaagctctccatgctgctcctcgaaaccaccaaatgcttgcagcactggaccagtatgctgcagattttgtagcgcgttctcgaataccttgcgcgcattgcgcatacgattgcgctttttgtacagaacagccagagacatcatactgggcacgtggtcggggtactgctccaaggcctcgatgtacaagcccactgctgcgtcctcattgcccagttcctcctccattttagcatacgagttgtaggccgacgcctccacgtagagcccgccatcaataaggcgcctgtacgcgcgacgtgcttcgtacacatcgccaagcttgaagtgggccattgcaccgagaagaataagccacttgtgtgtgggaaatcgctcgaaggccgttgcaatcactgccagtgcgttcttgtacagcccagcgtcatactccgccttggcccatgcgtgccagacttggcccgtagctctcgggtgagagacagcattctgaaagatactgcgtgccaatccaacatgctgacacttggcctcaaatacaccataagcctgcataatcaacacgtccttcgggtgttcctccagcagctcctggaacttctcgcgagcttcatcggggtgtcccgcttgaacttcccacagcgccatccccagccccgccatggggttgtgcgaatctgtcgccaaaatcaccttgaagatgcgtttggcttcctgcatattcttcgcctccagctccatggacgcccacgaggtccacagctcggcgtcgaacgagatccgcgacgccttggagaagatcatgcgcgccaatccgtagttgcccgccttccactcctacaatttgagcagcaacagttgtgtatttaatacaccaattatccccaatacaacaccaggagaagaaaagatcgccctaccatgacgccccacttgttccacatgcccatatccttcgggtagcggcgctgcagcacgttccggaagaggttgcgggccgtgggtacgtcatcgcgcaccagttcgttcagcgtgggctcgggcccctgccagcggctcttgacgccctccaggtacttgatatcgggctcccacggcgtcttgcccgacagctcgctaaacttcttctccacctggcgggagtagtcctgtccctcgtacagcgcgtccatggcccggaacctggagaacgcccgcgtctgcacttgcagagcgttcacggcggcgcctccgtgccgcgccagcgcctcgggacgccgcagcgcgcggcccagcgccaagcgccccaagcctctcatttcgtcaatgactgaaggcgtgtttttttctgttaagatgtcattgaagcggatcaatgtcactcttctgaaaacttatatttgtgtggagcacacttgtggtgtagcgcacaccactcgtgtgcggcgcgtttggaccagtcaaatgcagcgagggcctcaagccgagcaccgggcaatgcgtgggtcggtcattacgtaaaagcttcgttccgaggactccaccgtttacaagaatcatgtcggctgaggaagttgtggcggaggttgaggtgcccaaggagctgggagagatggacgccctcaaggaggtgctcaagaaggccctcatccacgacggcctcaagcgcggcctgcacgaggccgccaaggccctggactcgcgtcgcgcccgcctgtgctgcctggcccaggactgcgacgagcccagctacagcaagctggtgcgcgccctgtgcgaggagcacggcgtgaacctcatcctggtgccctcgggcaagcagctcggcgagtggtgcggcctgtgcaagatcgactccctgggcgaggcccgcaaggtcgtgtccacgtcgtgcgccgtcatcacggacttcggtgaggagacccacgccctgaacgtgctgctggactaccttaagcgccagggtgagaactaagcagctggacctttaacccgtccgaccagtcggtgaactaggagactcaagtgcaggttcgagtaattttgcccgcgatcgtaacacgaactcccggagagccgctgctgctagcgctatcctttggggactgaggcttctgccggaagcttttacaccaagagatgttcgcgtgtgttttccttcatcgctgcttcgctgttctctgtcgtttgtgtatcattccggcgagatatcatgcttgccactgcgaagacaactctcaaacgaacgtctaaagtctcttgtttcaattactgctagttgctggtctacagctaaacgcatttgtcccatcaataactctgctctcgtggcgcacgcactcctttagcgtttccttcatccggaaaagcgcaaagcgcgtatttctcgcgctacagcatcggtcactgccgtggcggtggaagcgtcgagacggatcgacttggagtgacgtacactcaccgatccgccttatgcagtgtctccgcttggggaggtcgcggagagctgccggttgacttggccgggcctacacccggtgtagtacgtcactggggctattgaagtcgggtactcgatacctgcagctccctgtggctcaacaagccacgttgcaacagtattgaagagcttctgacaggtcgccaaccggtgttggcgcgacaggtttccaaccttttccagtgctttcttcattcagcagacccagcgttcatcgctcgtgcggggacttgtcaagaaagcggcgttgcttcgcacggttcagcggaggcatttgcgtctcggcattgcgtccatgaacgtcgtacatcgtggaggctcgcatgtacttgaactttccctgagccaccggttcttccatcgtttcatcaggcttcatctgacgcatactcatcaggaacgggtgctgcatcgcatccgtgggggtaattcgcgtatccgggctgttaaagaagacaaaacgcgttaatttctgttgtcagggcagggataacaagacgccacgcaaaatgcaaacgtacttgaagtcgagcatacgcataacgaggtcgtgaaatgcatcgtactgttccgggctgtggttcagggtaccatacttgtgcgcaccagcaagaatctccgccaaagtcttgttgttatcgggaatctgaacgaaagcacacgattccacctgtcagcaaagtacgcagcattgaatcacaattggaagtggtccacttaccatatcaactcctttgggtggggttatcttgtgcactttcaggcggtagtcgatccacttgttgttgccttcatttatgacgacctcgtcaaaatattcacgccgatagctcggactggcacgggcaatcatttcccgcggcggcagacccaacacattgatgatgcggtgcagttggtctgccgagtcatagccgcaaaagagcggtttgccagtgtgcatctccaccaaaatgcagccaaggctccacatgtcgatagcggctgtgtaccgcatgccaagaagaacctccggggcacggtagaagcggctttgggtgtagcggtggatctacagatacaaaagcggtcagcattttccacctaaaaagtatccgcaagtcacaactcggcgcgtacctggttacgcgaaagacacgagcttccaaagtcgataagcttgagcgagctgtgtccgtgcgagaccagcagaatattctccggcttgaggtcgcagtggatcacgttcacgttggggtggcgcatgtactccagcgccttgaggatctgccgcgtgaacttgcgcagcagcttgagactaataccattgaagttggttccacggaggacgtcgaagaggttgggtcccagtcgctcgaacacgaggcactggtgcccctggtgcatgaacgcatccgtgagtctcactgcgacaccacaatcggcaacggttagccaccatcgcatcgcacacacatcagccaagagagaacaaggcgcgactcttgggtgttttctcctccaagaatagctcccgaaaccagcccgtgaatggagacaaggtccaaggaggcgcccacaagacggtacgaacacgtaccgatgtggttggtagcgtcgtgctgctgcggcagatgcagctgctgcaggatgttgatctcggtctgggcctgctccgtgtactgctgcttcttctgcacgatcttgatggccacgatctgcttggtcacgaggtcctgcgcctccacgacctgtccaaaggagccctgtagcagcagcagcaaaaagaaccccgtcagtcctctctgctagtgcctctattcagccgccctgttatcccatctggctcggggtccgtaccgcgccgagcttcctgccgcgcacgaggtagcggccgttgaaggtctcctctccggcctcggagaagacgtagttggcgggcaccttcttcttcttcttgacgatgggcttggggttgtgccgccggtagtaattctgcacaaaaggcaacagcggtcggctcggttaggcaacttatatgtctccttctcctcatccatgtctagactctgtcgatggcgcagcacacgcaccacgttgatgacgttcagcgtgcgcatgaggccgcgcgtgagctggtggcggggcgtgttcttgagcggccgcctggcgacggcgccgccgtccgtgatctccatagcgtgctgcctgcgctcgtgtcggtttggctttctctgcgcgcttcgcgttcgcggttttctcgcggggtttttctgcggtgcgaggtttttcggtggtaaacctgccttatcgcatagtatgccgctgcggaggctctccgttttgcgcgcgctttttatagggaccgaccgggccggctgccgccggcagttgaagttgatgcgacttggcccgaggccgacaccgtcgcattgcatgaccttaggctgccgcagcgcaccggggctggcaaccgcgacgctcgctcttgctgagcgactttgccgccttttccacgacgaagggcttttttcccgcgctcggccacatacaaaagttcatactaaaatctcagatcgcccgtggcctctctatgccatggatcgcgatacaacttgaagcgagcccaggccagagaagggtggacggccggccggcaacatgccggtggtcgacatgccggcaacttgccacggtgggcactgctgccgcatgagggcgagcccagcagcagcagatagcgacgcggcgtcatagtttggtgtccggagatttagcctagagggcagttcgttttcggcatgggaccgccggccagcgacagcgctagtaaatggtgtccgaattcggttgctgccatctgcgccaagtccatttttgggccgaccacagtcgtcgtcagatgcgattgtgtttaccgcgcgtttcgacggcgctggccgtcagaattatatcgcatcgagtgtcgatttcgtcggcggcgcggtcgttggcgacggtgcggcaggtctattgttgacggcggagcttgacgcggctcggctgcgggctgcacatgatacatgttgctaaggtttgccaacaagttgatgtcggtctcttgtggtcgctgctacggtagtgattcgctaaatcatgcattggagccctgggctcgagcttggagccttcagcccgtattgcagtgagctgtactattaccagctacatgcactagctcagcaacgcgtcgaccaaggcaacatgttcaaatgcaattggtccaagcagcggacgcatccccctcgtacgtcagcaggtggacgctgaatgcgaattgataccatcgcgcggtatccgctcgaggtcattccccaatcatccgcacagcgcacaaggcgactgcttgccgccccccaaaccgctcatgacgcgcccgacgcccgacgaagtggagaccttgaccgacctggccagcgccgcctacggctcgcgcgtgctgttcgcgacggacgagtggttcgcgccagccagcgacctgctgcggccggagccgccggtcttcatcgccgacaagttcacgagcttcggcaagtggatggacggctgggagacgcgccgcaagcgcatcgccggccacgactggtgcgtgctggcgctcggcctgcgcggagctgtggacgtcgtggacgtggacacggccttcttcacgggcaacaacgcgccgcgcgtgtccatccaggccgccgacttctcccagcagagcgaggcgctgcggatcctctcggccagagccacggagcagcgcgcgatgggcgtctgcgcctcggccgaggagctcaagctggccgagcagctccagtcgcaccagtggacggagatcgtcccgcccacggagctcggggctggctacgccgagacgcgccacaacctgctgcgcgtgccgccgtccaagagagggccgtggacgcacctgcgcgtcaacatgttccccgacggaggcattgcacgtctacgggcgtacggagaggtggtgatggactggagccgcgtgtcgagctcgcagttgctggatctggtgagtgtcgagcacggcgggcaggtggtgggcttcaacgacgctcactacggccacccgcgcaatctgatggcgccggggcgcagcaagacgatggccgatgggtgggagactgcgcgcaaggcgacgcgcccggccattctcaaggcggaccccaagaccgggctgctggaagtgccaggcaaggactgggtcgtgctcaagctggggcacctgggagtggtgcagcaagttgaagtcgacacgaaccacttcaagggcaacttccctgagagctgcgtggtgtacggtacgcgattcgagggtgaagaggacaagctactgaaggatggagccgttaagtgggaagtgctgctgccccgggtgaagctggaggcgcacaagcagcactatttctccgtcacgggcggcaacgtgaacctcattcccggtggtgtcaactacatcaagcttgagatgttccccgatggcggcatcagccggctccgtttgcgtggtcacaagaaggacgctaccgcgcggctgtaagctgcaggatccggcgtgtattcaaagtctattgggtttcaggctcagtatgattcttcagcgcccatggcctctgcttgagtagtttcttcttcttcttcttcacagcgatacagatctctacgtggtggtcgaaagtagatgccctccctgcacgcagacagaatcaaatcaactgtcaatgaaattctcacatgagatgtttcggtgttgccgttgttacgcacctcagtagatgggatattggcaggttgcgaatgcgagccaagtgggtgtttgccgatgctcgaagtgctgccgcagtgtttgaagcggacgttgtcttggtgcgagtcgagttatcaggccgggtcttggcacgcgctgcaaataatttgtgcactgcctcgcttgatgtaaacatctcaaggtctggacgtcggtggctcgtagctatcgccactttcaacgggcgctttccctttaatgcggggcttggtttcgacttccttgacttcgtaaaatcgtattccttcgtagctgcgtcgataccgtctagtgcgtgtaacagggtctcctggaaggtttggattgagatttggccattaccgtgagcatcaaaccgatacagaagccgacaacaatccgacggaagcaacgccttcagcccgaggatgctgtggaaactccttaagctttccacgaagtcttgccaaggtaccacggacgtatcttcggcatccgcactggtgtccaactcattattactgcggcgccctcccccactcaaaccttttcttacgtcaaaactttccagtagcgcacgattaatcaactcacgactggcatttgcttgatctcggatctggtgaacatattgcttccagaagaactacacaacataatgagcagttagctaaattatacactagaccttttctgcgtggtaagcagcagtaggctatactccttttacctggtgaaaggggtccacgagaaacgtgcgaaatgcgctgaacgtgatgccgtcgctgttggatggtgacagctcttgcattccacgaaatagcgcaaaccattcttgctttggtactgctaccactgcatcgaaaccaaatgctgttgagtggaagatcaactcgcgtaagtgaatggcagtcttcacattagttttggttggacccggcaactgcaaaccttgcggtgagggcgtagtaaaaagagaaaataattcctcgattttcttgccttccccagtttgccaaagaaaatcacttagttgagatttcaatcgtgtaatccgaccattttgagccgtatccggaaactcgtggctctcatgtccgtatcgccgaactaccaggtcgattgactgcactgagtagaacaagtcaccgttggttcttcgccaagccacgatcgagtcgtgaatacccattatgttggaattagcaggtgcgagtgcgtcacgcactgcgcgctggttcatcatagaaacacctcccaaatagtcgaatgggatctgcttaacagataaaccaacgacggcagcttttgagcgggcttcttcatgatcaattggctttgggctctcctgtgagctgccgtcagctttccctagccaggttgcgattcgaaatgctacctttgacgatactttatcagcccacaccggtaggatcgaactgagacccagcgaaccttgatctggaagaagctgggccggtgtgtttaaaggtgaggaagtatcgaattgccggtcccacacaacaaatggtcgttctgggttctgtaacagtaaaaattgtgcatcgtgctcacggtcaaagtcgaatggaggttcactgaactcttcctcgtacgtagctgtccagggagaacagaccaccgcgtctctaagtgttgcatgctgcagcactgaggatagaaagaaagaaaaatgcgctgctggtgggactgcagtcaacgcggattggtacttcgaccatacaagatcatggttcgtcgtcagaacatggtatctgctttgactgttcaagcaacaatttacaaccagcagcggagctcgataatcatgttcatcttccggatgctgggtagcgtaaatgaaatactgcccgggtgatgggaatcgtaactgcaccacaccaagatttgtatgccgcgactcgctgtcgtcgccaacgatatcaaggtgggttagtccgtactgccagtgattctcacggaactccacttgaacagcaggatccgtatcgtttgatccagactcgattagtactaccaccgtatcatcggtatacacgcgaatacaattggagtaaagcttgtaccaattcgtatccacgcgctcgtgactttcagtcgtgaacccttcaacgtgaatgccgagaactgtgatagtcttgccttcatcgtgctcgatcggagtcgtctgtgtttcgctttccagtttgacagcatcgataacaatcttacctccgataaccataccgatagaacttacaatagaaatagtagctcggccttcgatttcgcacatcaaaatcacttctgctgctgaattcttgctactggctttgttctgtcggatcacagaagaaatcgccacgcactcgccgttgtcttctaacgcaaataagtgtgcgtcgttatcggataaattagcgattgcgttgagtgcacttttgcatattggctgcacttgaatacagatttgagcgtctgcaccaacgcgcaatcgtggcatcccctgctcaattgcttggcgtgaatctccatacgtagttatttccgtgacaacccaagctgggcaagtttccagggaactattggtgttagcacaaatacccaccaagataccccaccccacacagaggtctgcaaatgtgtttttacgaccttcacaagataataactccagaggtagtagggatgcagcatttactgcaccgacaccccacacaaaagctcgctcgattgtagagtagctatcgttgacgcgtttaagcacgagaatagcggatgagtttcctccacatcgaatctgcacgttgtgagtagaagatgccagagcatgcggcactgcaacaagtacaggttgaaagtactcgcagaatttgcttttcgcgccacacgcaccaaacgcgttgcttccccacgcatacacctcgctgctccgagacacggcgacagtgtgattccagccgcaggatatagcagtgatacaaaaatcagcttcattgcgaaagaagtcaacttgagtggggtgttcactgccgacgttggaggtaaccgcagggccgagacctagctgccctgaactaccatacccccacgtgaatacgcagccactttcagataaaactacaacatgttcgagtcccacgcttacatcgatcagagcaatattttcatcgagaagagggaatctcactggaacaccttgtcgaacaaaaggtgaatctttgcagtctgatggcaacaatccccaatgccagagtttagaagagccacagctaagcaaatacgtcgcgaatactccacagcgcaaaataagagggtgagtcgggtctggcttgtgcagcagtacaagtagctccccagacactgtaatgggtgtcattgttgaagcaacttgacactccccgagaccaagctggccgtattcgccaagcccccatgcaaaaagtccgagctttattccatccgctccaccaatctctcccagcaccacgcagtgtgtagctccacaagcgacctgctgcactcgaattttctctgtgatagacagctcaatggggcagcaggccgagtcgcaactgtgtccatcgtaaatttcacgttcgcgtgcggatagccgcttcacctctgctctgatcgcatgggcgcgactacgccgtttgccctgccgcaattgaagtttctcgtacgaaagctttcgtggagtcaccccgcagtgctgcaaccgccccgaagtcgtcaagtagaccgcaaaatcgcgtccgactgccatttccgcaatctcgaccccgtcgtcaaccatccagctggtggccgccgcccatttccaggccaagtggttcttcctggccacgagctcacatcggagcgccatgttaagtcggtttttgagcattatctgtcgtttcgcacttcaacctacgtcacgtcatgcattatcatgtattccctttactagttcgcgatgatcttttctgagcctatttgcagacttcctccgcgccatgtcaggcgtcgagtctctaggcgacggcgacgtgcgcgagcgtctgctgcccgatcggacgcgctccgcctcgcagaatgaggacgaggagcaagacgccttcacgcacgaggagttgctgcactctatcggctcgttctccgccgtggtgtggcctgtggccgtgaccatgctgcttgccaggtgcattaagctcttcggttttgtgcactggatacagcacagctctcttacgcttggcgtcatggctttattgcagtttcgtgtcgcttaatgtggtggaccgagcctcggccaaggcactcgccgagtacgttgcaatgtagtaacatgttaagtgcgtggtgttatcttctggcttaacggtagattgtcgtgttgcagagcttacttggtgtacgggccggataaggacaagggcgcgtcaacggggacgaaggtggagaatgcactggtgaatgctctggccatcgtgtcgtttttcctcgtggcgacgttcgtgattgtgtgctgctacaagttcaacttcaacaaggtgggggatacaaaagatacttttgatgtataaagcttttattgcatggcagtgcttgacacggatgatgttttgttgtagatgctgatcggatacatgatgttctcgtcggcgatgcttctgggtatgctgggaggcaacatgttggtcatcgtcatcgccaagatggagatcccagttgatgtgttcacgctgctatttgccatgtacaatttctcggtggttggcgtgttatccatcttctaccagaaaggaatgccgatgtggcttacgcagacgtacttggtggccacgtcggtcatcatggcttggcagctggggcaatttccagagtggagcacgtgggcgttagtcatcgtgttggcgttctatgacttatgcgcggtattgacgccctgtggaccgttaaaatggctcgtcaacctcgtccagcaagaaggacgcccgctgcctggtaagtatcacgatattttgtattcagtgtttgaggtgactttgtatctcacttatcatgctttcgtatgctggatccgcaggcctgctttacgaggcagaaattcgtcgcgaccactcgggcaatgcagcgcctcctgtgcgcgagaacgtgtattatcagtgcgagacagagattccgctccggctcggctcgtcgcgggaagctccagcatccaccgagccaacagttcaaacctctttgacaccgcgccaagcgcaaatgcgtgctcggctaatcgaattctatacgaagcacaacccagaggcgatctcgcgtgtcgacaaaattttggagcggtatcacgggcgagaagctgaactatggcacgacttgtaccagaagtacatcactgatgaaggaggtaaacgctgcattgtgtttgtacattttgaatgctggttggtgttctaatagcgtggtggtgtatagacgttgatgagacgattaagctgggcttgggagacttcgtcttttacagcgttttggtgtcccgagctgccaagtacgatttctccgcgatggtcgggtgtctggtgtctgttctcatggtgcgtctatgtggcttctaaatgactggtaacacaagttggcttacgtgtttgcctgttgtgacagggtctgggaggcacgctctttctccttggaatctaccagaaagcacttccggcgctgccgatctctattttattggctgtcacgatgtacttctggcttcgggtggtattcgttgacttcgcgagtagtgcactgagtcttggtgttcctctataacacatccgatagatgcgaggtcatatacgcttttattagcgaaagcccgttaacctcatagaaaattgccttcctgaatacagtcttggaggaaggaggtcaagaacgtgaaacctaagaagtgtagtgcttcgagctcaattttccacggtaacgagtcctcgagccacatctgaacttcatccctgtagtgctcatttgcctgatatcacaattctcacatgagcaatatgattgaacgttcacgaccgctgcatcgtacctgcacgaagcttgcttgcaacaaggagtttgccacagcgatgtccttccgagtgagcgctttaaacgatgactgtggcagacctaaggccgcgatttgggacggacgaacaccaacccacttgatgtcgacggctacgcaaaacgaaatggctcggcaaaatcagtgtaatactacaacacaaagctgtgtcagaaatgaacttcctaccgtattcaagcgactccaacggcatccgagctgatcctagtttgtacgtaagctgccaaagcatgcattagcatatcgaagaatggttgcctatgtagcctactcgctctcaccataatggagaggccaaacgggttgcagtcacagagaccaaggacgggaattttcaacgcgtggctcaaaaggctcacaaacaccctagtaggaaaatgtgtcaatgctagtaattgctgcatccgaagctcaaatgcaagcccttacttacctcgtagccagatctggaaaaccgcgaccagtgatcaggatgctcggaaccatcttgtaaaacttatcctctctaacgtgacggtgagttggtgaggggacgcaagaagtagccaacgctctaagcaataccgtaagcgattgaatatgcctgcaataacatcattttcagaatccgcaacagctagaactcctgtagctgtaaataatcttaccatccttttcaacgacgaggatgtacttggcactactttgcctggaaaaatagggaattccaacaacgtagcggtaacgatcgataaagagggaggtgcatagttctgataaacattcgtacacgtcacttggcttcaactgcagaagctcttgagtaattgagacctcttccccactcccaaaatgcctccaacagccatctctcttcagatgtagagtgtgttagatccctaacattcaccgacgtgcgcgggtgcgccacgtaccaaaatactgatgtctccagtgaagcagcctttcgttgcaccgacaatgttcatgcatcctcttggaactcccaggatacttcccgcatctgccagtaccgacaaaagctgttagattggcatgggatgtgaactggaaacccacctaccgagaatcgcttcgtccgcttcactttgccctttgaagaacgggtgcagatagtagacatctctctgtaacacattgtcaataaagcatggattacacagtaaattcgccagttgtggatatgaaagcgaacctgagttgccgtcttgttttctgttagtagcgcatgtgcggtctgcaagatgagccaaattccggtgtatctcctccctccctgcctgttctgggggacaattagacgaggggggtccacttgccaggatcttaattgtacagttaccagtttcacgaagcgcctttcattcccgtggatttggcgctggttctgatggtcgtacaccaatgctgacgaattgcgcttcaactagatagacacagagtcactacaacacctcacataccgagctaacatattcgccaacgagcttacagcctccagctcgagcagcttcccgtcctgagccccaaccccgtcagaaaaatgccacgcagcacgtgaatcctccgtcgtaccgaaagacgctccaagaaatctgctgccagcgcctcgatacgccgcaatacctgcccaataccaatggcacattcaataccaccgtagatgagctcaggggagatacagggactcacctcgtcgcgagacaaggcgacccattgggtcgctgctgctgcttcctgcccgcgatctgctgccatggcggcaacttgaagaatgacaatcactctgccgacttcaacttgaacctctctataaggattccgcactcgcgcacattgagaaatttggaaaaatggagacaaaaatcaaaatttgactggcatttaggtcaagcggatgcctgaaaaggagtcgccgtcccgccgcggggtgttgctcttggcgcgcaggaagcacgtgcggccgcgccagaacgtgaacgactggcagccaggatgctcgcagcacaacttctcgcactcgtccacgctcgccacttgctggctcatgaggtcgttggcgtcgccgccgctgtccatccagctgctggagaagtgccgaaagaagcacttcttccgctgccacttggccacgccgtcctcggtcttggtcggggcgctgcggcgagacacttcactgccttcttgctgcaggtccaagggggagatgggcgccatgtacgacgagaagaaggtcatggagcccgtgtgcgcgcagaatgggccggtcaaggagttgcagccgtcgttgttgccgtcgtcagtcgcggtgtacgtgcccgctgtactccgcgcaccctgcttcagctttgacggcatctccgcgagttttctgcctggttgatgtgcaaaggcgcttgggagacacaggagggtcgttaatgctgtgaggatgagcagctgcgacgccatgccgagacgcggcgacctcctcatgctggtcacgccttgccttgccttggaaatggcgagcaatgtcatggcgctagttgattggtcgaaaatgagacggatacgctttggatcgggcggtcatgcccgaaaggtcatcaacgcgacttgcagcggcacgtgcgaccacccagctcgccataagttggtgccggtgctggagctgaagcgcagcatgtccatcgtgtacacgctggtggcgcggcaacagagcgtgttgtgcgagcatacggaccagagcggcaacttccccacggtcacgcgcgccgtgctgaagcacctggcgcagcacgagcctagtgcgtcagccccggcctccaagagcgtattcccgtacaacgagttcaacttcttctttctctacgacgatggtatcacgtacatgtgcatggcggaggagcgggtgcacgcgaacgtggcgttcatgatgctcgccgaggtgcagaccatgttcctggccaagtacaagcagcaggcacagaccgcactggcctacgccatgagctccttcaatccgacgctagactcgctcatgaagaagtacgacaactacaagctggagacgcccctgtcacaagtgcggcagaagatggaacgggtcaagacgctgatgattgagaacgtcaaccaggtgcgtctcgtgttcgtgtatcctttcttggttgctccggaagaactgaaaatgagtgctttttgttctgtgttgatagttaatggagcgtggggagaagatcgagttgttggtcacacgaacaactaagttgcagcaggatgccatgaagtacgaaaagtccgctaagaagctcaagaatgcgtactggtggatgaacgtgaaatactggatctacggcacacttgccttggctgtacttgctctagtcgtgacgttcatgatttgcggggcggacttgtccagctgcgctgctcgcgtcgaaaataaagcagaagacggaatcaataaagtagccgagaccgcctccggtgcagcaacggatgcagcgaacaaagcatctacaggcgtagctggaggcggtatataggatgcactaatgaaaacttggttttgatcttttcattagttggtgaggcatccttgccaaagatttctgtgacgaacctcaaaagctacggcaccaatgcccacttatcaccagtaaactgctttagagacatgctgcttacatgtcgcccgaggaggcagtgtccgcagccgccttctgcagcagctcttccgtctccttctgggtcagctggcggtgcacgatcttgccctcggcgttccgcgtgaccgtcgtgaactcaagcttctctgcgctgggggaggtcgagtccatggtcttgttcatgaccttcaccgagaaggccagtgcctcctccaccgtcatgccctcttcgtagtcgctcttgagcatgctcttggcggcgcggttgttggcgccgatggcggtggccttccagccaccgtagtttccactggggtcgctgtggtacagctggaagccgtggtggcggtcccagccagcgtacaggaacgacacgccgaaggggcgctggccgccgaactgcgtgtaggcctgcttgtagttgcaaatggtctgcaccaactgctcgcacggctccttctcctggtacgcgagctcgtagcgctgcgccgccagacgcgcgtagttcaccagaatgttggcgtcagaggtcaggccggcgacggcgcagatcaggtggtcgtccagcttgatggtcttctcgctcgtcttgctgggcgtcagcagcttcgacaccgtcttcttctccgctttgcaataaacagaagaagaaaataaaagatcgcgactcggttagcacgatcttaaggatttatataccgcacagtgagcgtgcttcacactgacctgcaatcacgatgccgtccttcgcgaggatacccacggccgagccggcgttgttaatggcctccatggcatactccacctggaagaggcggcctgctcgtcaataaaaggacaatccaaattgcacgcgctctgtgtcagttgctgctgtagagatacgatatcactggaggccaaatgaaataggaggttcattgcgcaccttccggcgagaaggtagtcgtgcggccgtcgtatcgtctcgacatggggcttctcgggtgctgctcgctgtgatcttttgccgtatctgaccgaacgaaggggggagaagagatgcgtgcgtttctattggtcaaaatacattttattttagccaatgcaaaagtcttctcaaagtatgattttgtacagcttacacttttgagcgtatcatttcacatttcacgagggcgagctccatcaatcagggttgtgaaaatccccatatttttgcaaggaagggtgggtttttcgattctgtcgggtgggtcggggttttggataaatacaacctaacccttcaagtgcagtcatgcaatggcttaggttaatatcagttgatattattaatagttgaaataggttatggtgccacattttaagatcggtcttgctctgcgccttggcagcggggttcacgctggacgtggggtagttgacctgcttggcggagccctgcgcggcggccggggactcgtgcagcgcctcctggatctgcttctcgtagtccacaccgtagatgtcgcaccaggccttctcgaccaggccttctcgccctgggagaccggcggcacgctcgtcttggcggagccgcccgaggtggcgggcgtctgctgtagtacgcgcgcgggcgtggacgagctggtgcagcgggcagcggccttgggtagtcggagcgagttgcgggccagcatgactgtagttgctgttgtagttgctatgggcggcgggtagcggcttgcggggtggagagtgaattcggatgtgagccaaactcgagttcgctgcgcctccaatgcaagtgatgagcgggctagagacacaaataaatgtctaaacattcgatttgagtcctataacaattgcagaacatcatttcagcttcggctttcctcaaatattagcgtttttacatgcatttggcgttaaattgagtataaaaactaataaatagcgcttggtcaatgggtggatgggttttatgaacatccctagaaagcccgaccccgggtgggtgggtggaataaatggtttattcccaattcgaaaaaccccatctcgcaaccctgtccatgatcgagcgcctgctgacggccatgtacgcgcgcgagccgcacgtgaaggtggtggcggcggtgaccggcggcggcgtctccgttgccgagagcctgttccggccgggcagctcctccaccatgctgcacttcgctgtgccctactcgcgcgcgagtctgcagtcgtttctgagctcggtgccctcgacatcctcctccaagctcaagttctgctcggcggagacgtcggagcgtatggcactggctgcgtggaaacaggcaaacgaaattacgcgtcaggaggctgaagaggatgacgcgcaggctgcagcgttgctgccgagcgcgttgaagcgcttccgagcgtccttgggcatcgcgtgcacagctggattggcgaccaattaccccaagaagggaccgcacgagtgcttcttgtccgtgtgtcaggctcgtgggtctacgctcttgcggccgcagtgtgaaacgtaccatcttcaattggacaagacgttggggcgctcgaggacggaggaagaccacatcgtgagtcgctggctcgtatatcttttggccaaggcggctgatgtagacgtggagacctgtggtgctttccgtgacgagctgctggctgcacagactgggagcgatgcgttggtgaagttgacatcggatgaagaagacgctagtgacagtgatccgctgcttgatatctgcagcggtaaatcgagccaattgatgggcgtcgcatttttgccggagaatgcaaatggtaaagttgaagctgctgctggtgctgccatgacgacgactgctacccgagactttgacttccgcggattgattctgccagggtcttttaacccgctgcacaagggccacgtcgacctcgcgcgcgtagctcagcaggtgctgaagtcacaaacgggggtggagttgccggtggcattcgagcttgcggtatctaatgctgacaagggcgcaatagagtcggccactatcgcgaagcgcgttgtacagttttcacacgacaacaccttggggttgggggcgtggcctgtactggtcacgaatgcgacgctctttggacagaaggccgagttgctccctggctgcgcgttcgtcattggcgctgacacggcagttcgcatcgtggacaagaagtactacgacatggacgagcataagatggtgctggcgctggaccacatcgcccgcaagaactgctcgttcgtggtggctggccgttttgataacaaggtggagaaccgcttcatttctgctgaggaagtgctagagaagtcggtgccgtccgtgttccgccacctttttgtccctctgccggagtccgcgttccgtaacgacatctcttcaacggagcttcgacgtcagatggcaacacaatgagcaaaggctgaaggatattcgcaaacggaagtacgtgtcgctgcatcaagcgcgactcgttatttgacctacagcgacgctgttacaaataaaatgtcaacatggaagtggatctgcagcgtacaactgcaaactaacagcagattgcaatattcgattcgcggcaataaatgcttttgaccaaacaacgtgttcattccacgcctactgctatcgtctctcttcttctttgatactttttcacggcagtaggctgcgcgcaagatataacacacaccgtgctttcagcctcgcccacctcttggtgcgtgagcgtctacatgccctcttcctcatcttcctctagaaagccgcgcgagggcatgtagccacgagggctcttggcggccgcacgctccgccgggtgcagcatgcgagacctctcgtcttccatatcgtagtcgtcgtccatcgactggtcctcgagcggcatgtactcagccaaaatgctgcgcacctggtcgcgcatgtggcgctgcgtacggcgccagtagacaaagccaccggcagccacgatgcccacaaaggcaagcagcacaaccaccagcgacgtaaaggagtagccgccactggccgtgatggcggctgcgttcgcgagacttcccaccttgacgcaatccaacagacccaccgacgactggctagcgcatgtgcacacctcaggcgggtcgtggacaccatatccagcacacaccatgcccaaaatgctggtcgggtccacacggccgcgggcatgcacgccgtccacgtatagcgcgggaagccgcagaagctgaagtgccgtctgttccttcagctcctcttcaagcagcgggttcacttcgtccacattgacgccgtagggctgcatgcactcttccaccgccttgatgtcaatgctcagttccttcataaccttctcggcgcaggatcgctcacggaaaatgttctcgtccttgccgcaggcttcacccgaagccttcacgtacttccaccacttcaagccgacaccagggtccgtcttgctctccagcttccaaatgcacttgcggcgcaggttctccaccaccacatcagctccagacgcgccagtcgagcggtcgtggaaaggagacgggtctagcagacagtagcggccattgttcaggcacatgttgccacacgccgacgtgcccgggtcgctgtcttcgtggcaacccaccttcgttccgttgtacgacacaaagtgcggcgtgaagaacgcgcggtctcccagcgccgtgatcatctcctccaggttggccagcgttgagagcgactggtcatcccaggcgctttgccacagcgtccactccacgcggccgtcgggcgaggggatcccccagtcgaacttgaccatcacgttgctgacacccttgctctgcgcgatctcgcgcttgatcgcgtcgccgtcgctcttgcggatgagcatgctggggatggagatgtcgccgccggactcgtcgtccgccatgaagggcagcaccgtctcgcagaagtcgtcgcccgtctcgcgcagacactccacatcggtgcacagacacttgttgtctgcgatgagcacggcgcgcgcgccggcgtgctgggcgcgccgcactttctccacgaagtggcagtcgccgcggtccagcatgagggcgaagggcggatcccagtcgccgttcttgatctcctcgcagccagactcgctcgtgtacacgagctgcgtctgcagcgagcccatcgagtacgccgggtagccgaacagcgcgtccttgtgcgcgtatccgtccttcttcatgagcttctcgggcagcacgatctgcagcttcgtgtggtcgctctaagcacatgcacgcagaaggaaagcaaaaggttagatacacatgtcaaaagcgatcttggaggcggcgggaggcggcgcgcacctccgtggacggccactcgtccacgtccatggcgcgcgcgtgcacggcagcgggcgcgttgagcgccagcagcgctgccgcgagcagcaaggtcctcggcacgtgcatcttggtccgctgttccgccttcaagtctaaagtcgagtgatgggaaaaagcttcttcgggggttgaaacatgtcgcccctccctacgtaaaattcacgataaactgcaaaaggagggattacccgcttctccgtaaaatccctggaaatccgatctgatccggccaatcactgaccgccattcgctccccagttgaagtcgcgctgatttgccgagttggccaaggggttggcgcgctgcgtgcgcaaggacctcgcagaggtgaagaaggaggcagcgcgtgtgtgtcagttgcaggtgtatcaaggtgatagggcctaagggagattggaggaggggggagctatgatgtgagcaagtgtcctggaagataactgcattgttaccgataggatggcgatcttctcttcctgctcgctcactgctgcagtgcgaggaggtagagcttggtctggtgcttcatctggttgagtagcgtggcgtggcccgcgctcgtcgcctgctccgtcgacttggcctgcgctagctgcttctccacggcctcgatctgggacttggtgctctccgccatgaggtcgctcagcgctaactggaagaagcgcgcttcgacgagcagctacaccagacacagcaaaacaagatagcggtcagtacatatgcgtagcgcacgcgcagtgaacttggtccctacgtgattgcgcttccactcgtcgatggtcgaggttgaggcgcccgcagcgttgtcgagaccacgcacagagctttgcaggaactcagcaagtgctgccgtcagcgggtccgtgacgctgcgaatgtagtcccagcattggggatagtctcccacgctcatctcgacctcgctgcgcagtgtgatgagctgcagaagcacgttgaacacgtattggcggggatccgaaggcatggacacggagctcacgggactggaggctgtgacttgcagtgctgcaggtgttgaaagccccacactacccgagcgatttgtgcgagagctgtgtcggctacctcctccaccactgctgccgctgctatgagcctggaatgattcttccgctgcaccggcgcgtagaatacgctgaagtggctctgcgtgagtggacgagtaaatatccatgcacttggtttccacattctgcaccaaattggagagggcccgcgtgccggaagtagctgcgcggccgtgctccagcatgctcttgtaggcatcttcgtcaatatcaccatactttagctgcgccacccacccatccacgatacgaatgcatttctcgcgcaagtcgacgcagttcgcgacaattgctagcaaaatgcatacgcgtgcaccgctctggttgttgttggtagtcatggctgcagtcgaagcttctaccgggacaggtggattgatctccgcaacaaaggcagcaaccaccttgtcaaggaactcagacagcatatcgcgcaagtgcttttcaagggcctgaactagctgagttcggaagtggaagtcaacatcagtatcaggagaagctggcgtagtggtccccttgttgttggtgcggtccgcaatgtctaaaacgtcgagcaacacttgccccacatccttccagataccattccagcgctgcagaacgtcggtggcgcaagttgtaaacaccagcggccgatggagaagaaccttggactcggaggatatcgtagatgcattcctgatgacatcaaaagcctgtcgagcctccattatcacgcgctggaccttcgttcgtggggcagttgacatcacgggggtgagcgcggatgaactgggcgttcccagcgcaatttcgcttgaaagagacggaagaaccatgacaactggttcaaaatactcggcaagcagctccgatctcgcggactggcacaccttgtccagatagcctagcgtgaccgccgtccggaacttatcgcagaaaatctcgttgagctgctcgatattgatgttcaacgttgcagcattggggcatttccttaaacatcgaagttggtggaaggcttctgtcagtaacttgagacgtaatgcggagggcggtgatgcatgctgctccagcaaaccagcacacttcgacagaatgctccatgcttgctgctgcacgcgctcagcctcaacggacgtgatagcattgctcgtcgccgcagcactacccgctggggtcttgaacagctcgcaaatgaagccccagagtccgctccgaaaccgagccgcgatagcaacacactccttcatgacgtcttcactggtgatctggccatcttcctgcgtgtcgatctccgccagcttccgttccaagtattcaaactgcttggtaaggcaggttagaatgggcttctctaccagccccagtgctgtaagcacgtcaatcgcgcgcttctggaaggaagcaaacacattcaaaacgagcaccgcatgattagataggcatcaaacttgaagagcatgtcgtgaatagcaacgtacctgatcagccactgatgcagacatgtcctcaagtcgtttgagcagctccgtgttggcggtcgccgcaatgtcgtggccagcagtcaccacacgctttaagggcgcagcaaggttcgcaatcttgccgctttggtacttcaaccgggcgtagtccaccgccagcgtttcgtagtcctggacgcgcagacttgctttcatcttgcttgtcaactcgaggataggccgtaggcgagccagcaccgctagcgtgtggcggatccgccgctgctccctcgctcgttgcagcatcacagcgagggatgcatcagccacacgagtcaaattctgcatgtcgcccactagcgcctcggtctcttgctggtgcgcgctcacgtccgcagccaaggcacggacagcctcatggcagctcaagtactggtcgaagtgcgcgctcaccagcgccttgagctgcgcggtcttgtcggacgtggtcttgcgcagctctgcgagcgccgtctgcagctcagagaagctcgtgctctggcagcaggcgaaatgcggatcgattagccgcagtacagcaccatggggggcagcagcatacagtaccgcgtgcgtgacagcaagataccgcgcggcgttaaacagcggggaggacaggtcaatctcggcctggttggtcgatgcagcgccgccggctgcgcgcgccgtcctggcctctaggctgggcgccatacgagaactcgtaatttatgtggtgatcgcaacgcttcacggtaaaatacaagtgtagccattgtcaaatctttcggacttcaatgccatgtatcaaagtcctcacggtagtcgctggctggtattcatatcaaagaattcgattcaaagtcctacggtagtcgcagactggtaagtagtgtatatcaagatagacttggtggacactaaagaagagcgcatcattgaattggtcagtagtgaccactactgacaggatgatattctagctgcagccacggcggccgcgccaggcgttgcgtgaagccttagcgctaaggctgttgtgacctgttgctcttaaaatgccacgcccagagcttttcagtgcctggatggtaaggaattgtaaggattgcgccgcactccttgcgttttcgcagcttgccacaggcaagcgaatctctctttgtgaacaaaatgcctccgtccgaacggagaagctggatgcgttgaccgagcactcgactctgatgcggccggcacgggattactcgcaccgccgaagtacaagattcagaggtgcgctgtaggcgctctagatctattacttgtagtgtatggggcccgagattcgacagcagagctcctctgctgccagccagtctcgcagtgatagctgtctttacctctaagtctcaatctcacttttcaatttgcctcgaaccccaagcatcacctcaacgacactacactacaccagcttcgccccctcaactgctttcaacctccacccttcctcgccgcgccgtgcccaaacacaacaggaatagtgtcaggagggaaatattgtaggagttttcgtactgtcaggttgcattgtacgtatcatgatgcgggcaagccttccttcaataacggggttagttacgtagcataagaggcagcgattctgaaatctagagcgcttataaccgcgccagtctattgctgtctgctaagcttgaatctacgtagtgtttccgtttcggctttgttgacaagtttctagagagtgctcgagcgtacattctactcgtttgctattcaatgtacgctcaagcacaattcagttctccgtgtacgaaccgcgtcgtgtcctccgaagggcatctccctacttacgccgactacgcggcttcatggaagagctcctcgggcctcataaaatatgtataatacacactttcatttgaaggacctggcatttagtaggtcgctagttaggccaaataactgtgatgcacttcacattactacgaaatcgaaaacgaaacaaatacacgttcatgctgccgattctgctcgtcagtacggctatccgttgctggtgcatgccacgacggcgacgcagacggcccggccaagggcacacggacaacaccacgcataatattagccaatcacatggctaaatttgatttgtcgtcaaactgtcttacgaatgctcgacacaagtgaatctgttcatgttttacagcactcgtgaagttcagctgagggagaaaccattacacgacttttgagtacagtatcaaatgcaactcaaaatttgtggcaagttgaagtctccaattccaaaccgatcatccctcgaaagtaagagcgcacccttcgaacctagtcggcttgtataaaaccaaacaagcaagataatacgcacaaatacatctgtgtgcgtgcgagttgcatactgttggcgtcctggcagcgacggcaaaaaggtttgcgttgggtggtgacaccactggtgtgcagcactgtggtacggtgtggttcacaccatgcaactcttgtcgagacgaatagccccaccccacagggcacatcccccttatatcgatttgagcggggagccgctcgccagttcagatccggctactaatggtaccgccatgtcgagcggaagtggcacgtgctcgctgtgatcgactcgggacgcgtacggacaggcgaggtggctgcacgccgcggcagcgtggcgatgccaccgccgccgggcggacgagtgcgccaggctgccggcctgtcgagcagcagcaggcaagccccaccgaagcaatttttcgtgactaaatacgaaaaatatccaaagattatgtcagaaatacccacatcagcaccattgcagagaaaggagaaatccgagtccgggtcgacaaaaggacgacagccataatgtgcaaccagaacctcaaatagcaacttcaagttagcacttaagttgcaaattcgcaactttccgccacctgtcacacattctctcagccacatcaggccccgcaacgcagcagtgcaggcaggaaagagatcgatctgtacggagggatggagcgccgtagaaggacctgtggtggcgctgaagctccctctctacggtacgaagaaggaccagtaacgtgttaatgatgaaacgtgctaacagaagtgctatgtgttgctttgtcttctgcagggcgttcaagggcatctcgtgatggagtgtcaccaccgcggacgtgcagaagtgctctccgctcccggtggaggtgagaagggccggcgtgacgacactgcgggcttcctggaacgcgaagtggggctggacgtggctgcgtgcctcaaagctgacgacgtggacgcagagagtcgctgcctcggtcggaggaaacgtgcagctggagcaggcggtgcagcaggtagcgctcttgcaggagcggctgcgacagagctgtgcaaggtggtttgtggggcggctacgcagtggcgacggcttgctgcagccccgcgtggtatgtgtgcacgcctagctacggtgagtctactgtctgaagttcctatgatagttctcattactaaactgaatgtgtattgcttagtttttgtctagtgcgtagccattttatgcgggacggcctggggcttgtgtctcgctctgcattcgacgggctttgttcgagccgcgcgtagcacgcttgccactgcggagaagaccacggatagagagtgcgtgagtcaggtggatgcaagcagcatacttctggaagaagcggcagctgcatgaacgcgaggacgtgttgaccgtccacccagtcgacggcattccctccacttccatacgggccaggtgcacaccctgctgggccgttaccatgattgcttcgtgcgtccgacccacctcgggatcgaagatgcgagggcatggctttgaaaaaacgcgcacgcagtcagccggagggcgcgtatcagcatcttcatcgagcagaaacgcgatgctggctcgacagggagaatactcatgcagcagctttgcagccgcgagttccttgctgcgccggaccagagacttggggatcgtcgcctcggttgcgaagggcttgtcgcttaaactctcggcggtgcagcaggtaagaaactgccccagaagagcccccatcttgagtttggtgtgaagcgtgtactgacgcttgattgtcctgttatactgttcgacagggttgtttgtagttgcccagccccgcggcgtgtgtaaacctgccagtgcgtgtagcgtccagcgagccattgcgccttgaagtaggtgacaaatgtggccagctcaggcacttcagcccactctcccagcactcgcgctttcgtggtgaggaactcggcctcgctgagagagaagtgcatgtcgtagaccccagtcatcaccagcttagcgtgagaaggctgcagagcacgtgtcttctcaaatactttcgcaacgacatgataaaagcacatgaggtattttacctcagcactctcaccaaacacacgctccaccccgttgaactgcgcgtcgtcagcgtcacccatgaccatcttgatcagaagttgtttgccaatcacccgcttgtagatctgctgcagcgcgacgaacatctccgtgaaatgctcctgcttgcgctgcgagcttcgtgctcgcgtagtactgacaaaagcgctggattttggacagcgctggtagctcctcagcagccaggttaaacttgcgcaggatagcattccggatacgaaccggcttcagtccttgggccgtcatctcccgcgcgaccaccttcatttccgacgtgagccgtggttcgggggcagtgcgcatcgcggtgacatgcttgcttgtttcgtagatgtcgacgtggtcaaccttctcacagtggagcgtcttagcccgccaagggcacttggcgtagggagcttcctcagtgcaggaccggcagctacagcgacgaagccggtagcgcatgttatgcggctcggccacggtgcacacggtgcacggaactaactcgctcttggtaaccttggaaggcttgatcgtctacagcaagatgctggcgtctttgttggaaaaaccgattgcgagaggagtccagaggagagctcgtggcatggcgatgggtagtaggacggcaaggtgcggcgagtacttgtttcttaggctttcgaagtatgaagggcgctttaaggtgctggtgggatggctggctgtgctagcgtaccaatcctttgtgcatatcgtacctagttgggtgctgctgtgtggtgttgggtggccgttgtatagtttgtatacacgtgtcaggtttttaggtattgatggtagtttgtccgttttcgtcgggcagcgcactggttttgcctgcgcttggatggattcaccgcatggctcatgtcagacgcggcttcctcgcgctcgtgttgccgccgggcgtgttcgattgcggccattcaatcgggcgcccgagacgctgccggcgctgcggaaacctggtcctttcagtccgcagcgagacgctgcaccacatcgctcgcgccggctgaggctcagactgagcggggcgggttggcttgccgcagcgtgcacctgcacttcgcgtgtctgcttggctcgcttgcggccgcacaagttgcagttgtgccatgcgagcgcgaaaaaaagacgcagcctctccccgctgcgaagcgcgccgcgcaccgttgaccggagcagcaggacgatgacgtgcggcatatggagagcggcgttgctaggccttggtggctggcaggcgtcgccgccgtgtaggagaagctctcgttgccacgcgcctcgagtgacgaccccatttggcccctcacaccaacgcagttgagctgctggatacgttgcgagcaatactcaactcgagtaaaaacgccagcaattgtcacaattggtttcgcgaacagtggatcacctcttatcgcggctcccccaaacagatgcacctagacaggaataccaagtctgtagagcctatttcatccacaaaatacatcgcagatggggtccacacggatatgctgtatcgaagggttatcgcatgctggggcggggcgatggggaagtgctctgttttggcgccccctcgctctggtgagacacttcactttgctgcccagaatgccgcggagagccgtgcgagccgcgtgggagcctaggggacatgggcctcggtggcatttacagtcttgcggggacgagtagaacgacggacaggtagttggcacactcgcggagcgcggggatcatccgggcgggagcagcagcagagcagcagcagcagcaccgcaggcagatagcaggtgcaggtcgaactccttcgcagccacgttctctcacatagtcgcctccgagccgcgagccttcatgactcgccgcatggaccacttcttcgtctctcgagccccccagtcggtcgtggtcgccgcccctccctcctccgcatcggcccccgccgcgtcctcggcgccctccagccccacgtgcttcgtgttcgaggcgaggcgcgaggaccccacgccggtggatgacgacgacgatgacctggagagccgcaagttcgagctcaagctgggcagcgagatgcgcatccccgtgaccaagacggcggacatgcgcgccagccccgtcggcggcagcgagtacgtgtacgagaagcaggacctcaagtcgtcgtcgtcgtcgatgacgaccaacaggttcaggacaggagccatcgaggccaagattaaaaccctggcctcctatttaaagtcggtctcggctggcatccggagtcgcagcatgaccttcgaccgcgcacgccttacgcaggcgtactaccggaggtcggtgcccacgccggccgccatgcgcaccaaactcaacgtcatcgtgtctaggcatagcagcgaggaacaccagaccaccctgtcgtgggacgacatcgatgaggacgattgcatgagcttcggagacctgaacgaggtgatggccgccactccaacgtccaggaaacgtggccacccgagcgaaattttctgcgaggcggagatccgccagatctgcattcgctgcgaggtgccggagcagtacgttgagcaggttgtacagattgtcaagtcgtcgttcggcacacccgagctggatgtgatcgccctggaggagttcatgccgggcaacgtcgtcgtgttcgtgggcacgctcatctttgagagcatcgactgcggcgaggagtacgtggacctcagcgtcctgccgtgcttcctgcggcatattcaggagcgttacgacggcagcatgccgtttcacaacgccacccacgcggccgacgtgatgcacacgctgttcatgatgctctggaacacgagtctgggcgagaagatctcccagcacaaccaggttggcgcactgctggccgcggtgatgcacgacgtggagcacgtcggcctgaccaacgactttctgatcaagactagccaccccattgctcagaagtaccccacgaaggcgccgatggagtccaagcacatggacctcgctctgcaggcggtcgtggaccccaagttcgacattctgtccaagatgtcaccggtccaacgcgaccaggtgctcgaggtcgtgcgtgagaccatctcggcgacagctcttatttatcaacccgagctgctcgctgagatcaacaacacgacggccgacgagtggaagatgctgcaggacgaggcggtgctgccgcagagcctgcaggtgcgtgcccttcgcatcgccatgcacgtgagcgacatcagccagaccatgaagccgttcacgaaccacacgaagtgggtcttccgcctcaacgacgagcactacaagcagggtgagctggacgagcgcgagcagcggggcgtgagcccgtccttctgcttccgcgacaagtggacgtacgcgagcttcctgacgggccaggtgtgcttcctcaagaagctggcgctcccggccgtggtcaccctcaacagcatcccctggctggatgtgaaccagctcgtgaacggcatcgagaagaacatcgccgagtgggaggagcaggagactgctgcctcctgctagcgcgtacacacatgtattatcggatatgttgcacgttggagtatgagagcgtttgctgtagaactataatgcacattgcagaaataaattgaacgctacatgtaccaaccaacacactacgagagcttcatgttaccatggtactacatgcatgctgcaggcaggaccttcctgccagaaagaaacacttcggctcgctggcagtttcgatgaagcgcccgacgatcctcggcaacgttcttcgccatctcagctgcttgagacacgccgagcccggctgagcgcaagcggagcctctcgctccgctcgaaaaaggcaacttcccatgcgaaatggatgtagccatgtcgttagaatcgattatcaccggacgatgtgatgtacacaatgcgtccccttccgtacactactcgccaccgccccgggatcacaatcggcgtgttgtgaaaaaggagccgctcggtgacgcaccgcaaaagccaatcagccggcacccaccaacttcgacctcctcgatcgcaatgctcgcgcactgcttgaccaagctcacccgccccgtggccgcgccggtacgctgcgctgcgcaatatctgtctgcacctcccccctccttggtccttccccccatgggggctgataggagggggaaaaaacaaccttcggatgggagagtcggcctcggcctcgacgccgctacccccgcagcatttcatttatcaacagctcagctcagctcactaacaatcggtctcgtggcatgcaactgacgcgctcatgaccgtcacggaccagcaccacgcgcgcgcgctctccatgctcgaccgcttcacgtcgtccccgacgcaggccgagacggtgagcgacatctggcgctccgtcggcgccgtgtgcttcgacgtcgacagcaccgtgtgcgaggacgagggcatcgacttgctcgccgagcactgcggcgccggcaaggccgtcaaggagtggaccaccaagttagtgtttttgctgtctatcgactgagtgaagctgcgtgttgaagagctcacctgtgcgatggtgtttgacgcagggctatgaacggcaacgtcaagttcgaggacgcgctggcggcgcggctcgacattattaagccgtcgaggcaagacatccaggactgcttgaagcagcacccgcccaagttcacgccgggtgcgcagcgtgctgcaacgcgactctgaggttgcttggcgcaagctgatggtggtattgtttgatgtacgcgcaggtatcaagaagctcatgtcgacgctgcaggacaagggcatcgctgtgttcctcgtgtcgggcggcttccgtctcatgatcgagcccgtcgccgaggaggtgggcatccctctgtacaacatctacgccaacaccatcttcttcgacgacgacggaaactacagcggcttcgacgatgcggagctcacgtcgcgtgacggtggcaaggccaaggccattgaagtgtaagtagccaactcgtccacgtctactatctgttgctgactacggtaattattgccttcagcatcaagcggattcatggctacgagaagatcgccatggtcggtgatggcgtcacggacctccaggctcggccgcctgccgacctgttcgtcggcttcggtggtatcgtcacccgcgacgtcgtgaaggaaggcgccgacttgtttgtcaccgacttcgaccacttgaccaagctgctgcagtagacgcccggaacaaccaagatgtcctgcagagataaagcaagccacgttggatcacttggtgcagcaaaccccgtcgcaagtgcatacaggaaacgccggcgcgggcttccgttgatgtaacatgttcctagctgctactgtagtaaaagttgcatacaatagcatgtccatacatacacactcacataccacacgcatgaacgaacacacgaacaagttgcgctgtttgtgctgtcaaaaaaagtaaaaacgccgtgttcgtctaaaagctagccatgatctatacattagtcttccatctcgatgtcgccctcgtcgtttccggagtcctcggcgttcttgctgttcttgagctcggcgggcgttttgcgcagcgccttcacccggcggctctgcatcgagtaaatatcctggtggtccatgtgaatacggcccagcttgtcgcccgtgagctcgtcgcgagagatgttcttaatcttcttgggcgccaggcccttgggcttcttggtggcgagcttcatgaggtcggccgaggcgaacttggtgcggcggaactccaggtcgaagcgcgggcccatctcgtccagctccacgcgcgggtgcgactcgtcgcccttcttgaaatcgatcgagtacgagcggaagaagaccttgtccttccaggccgtgcacacgatgacatggtccaggcccttgacgttgacgctctgcacaatagtgccgcggtacgtgtcgagcagcaggttcttgagcttcatgtaagcctctacgctctcccactggtcgcccgtgaacacgaagctgggcttggagccgggcgccttcttgctcttgcacttgaaggcgctaatggccttgaagttggagaagccgaactccatgacgtccaggatgtggccgtcgaacgtgcggccaagcacgaggttgttcgggcgcttcttggtgctgctgcccacgaggaagaggctcgcgtcgttcttctgcgtcaggaactcgatcttgttctcgtcgtcgaacacgtggatgtcgttcttcttgcccatgaacttgacgaacggcgccttgagcatgcgcaggtccgtcagcagctcgttcacctgctcgttcgtcttgttgccgcgcagcaccagcaggttcttggtgttctccacgagcttgggctccttggccttgatggcgcgctgcacatgggccttgacgcgcttgggcttggccacgctcgtcaccttgcggctctgcttggccgcctgcttggccaccttcttgttggcgcgcagggcctgcttgcccgccgtgttcttgatgagcttgccaccgcctgccatgctgccgtcgactggttctgctgctggtaagttatggacactccggctacgatggcgccgacccgcagtctgattggccgcgcttgattggtggtgggcgtcacgacaaccactgacttttactaacgcaaaccagtattagaaatcattactaacatgcggatcagtagatttgctgccagtaagtacggtagttgccgcacaactatctatgcgatttatgtatcaattattggagtcgatggccaatttacagactttgcgaagacagatacttgttttgaaaggatatgttgcatttcatcgatcatcacggtaaggccgccttgagactgcttgcaaacatcggtgatagacaacaactcaaccgcaagaagagagcagcagcactacgtagcagcaagatggcgcagaacctgagcttcgcgcgcggcggcaccagctcctgggccgacgacgacgacgtggacttccagccgctgccggtggcccccaagatcgcgcagtacgtctcccggctacgcttgaagcggcccagcccagctgttccttcgtctctcatgcttctctctaactttctctacgtccttgctcgcctaccgcaggccggagcccgcgcagcccatcgaggaggaggagatccagcaccacgagcaacagcgcgacggtaacgtcttcgcctcgagcccattgcgtcgctctggcagtgagtgattgacacgcttgacatgcatgctttgcgcccccaatagagccgcgtcgcggcggataccacaacgacgaccgccgcggcggataccaggacgaccgtcgtggtggctacggtgaccgtcgcggcggatacgacgaccgtcgtggaggatacgaagagcgccgcgctccgcgcgaggagcgccccaagaacccggtgcctgacgtgggtccctggaaggtgaagagctgcttcggtggatgcatcaggtgattgagtttagcagggtggactgaagcttgtttgcatgtgtttggttgcagctcttcgtgggcaacctgtcgttccgtctgacggaggacgacgtggcggacttcatcggcccgcagggcatcaaggacatccgcttcccgcgtgactttgagaaccgccccaagggcttcgcctacgttgagttctatgagaaggagcagcttgtggaggcgttgaagctcgacggcgacagcctcgatggccgccacgtcaagttggacgtggctctggaccgtgaacgtgagcgcaagccgcgcgacaacggcttgtttgagaagcgcaacgatcgaccgtcgaacgaccgctaccggtgaggatatttgcctttgtttctcttgttttggtgcaatgttactgaacgaagtgctgcgtattggtccagtgagagcaacaacgcgccccgcgagcgccagcgtctgacgctgctgccgcgcaccacctccaccgagaagaaggactcggatgaacacaagcccagcatcttcggcgacgctaagccccgtgatgaggctgcgtaccttgagcgcaagaaggctctcgaccaggagcgcaaggccaagactaaggcggagaaggaggccaaggcgaaggccaaggcggacgctgaagctgctgcgttggctcgtaagaacagccacgatgaggcaccccgcggtggccgaggacgtggcggacgtggcgccgaccgtcgccccgtggagggtggtcgcggccgtggtgctcacgctaaggaggccgctccggcacggaagtcggagcctcgccagaagcgcgctgagcctcctgctacgaagatctcggcccccgctgctacgaagacgaccaacgcgttcaacctcctcgacgactccgactccgactcggattagagcgtactagtgtgcggaacgtctgtctccctagtgctagtgcgggcgctgcgttctcgcgtcgccctcatccatcgggtagtcatagtcagcgaactcacagtttagttagcttcgctacgtcgcatcagtttatcgatcgctgcgtatagcttagtgttgtcatttgtcattctgttggcttcctcttcacctcaatcgaccgatgaaaaacgctatggttcacaacacactcttcatttctctatgcaatcctttatacaaccttgctttagagcatgaactcctggtacatctcgttctccgtttcctcgtggaagacgtaggccaactggttcaggaaagtctggaagcgctcgtggtccttctcaggaacctggaaacccactagtacccgaccgacatcggcgccgtggttgcggtaatggaagagactgatgttccacgagctctgcagcgcctccaagaacgtggccagagcgcgtgggcggtctgggaactcgaagcggtacagtcgctcgttctgcttaacatcaccacgggctcggccgccagcgaggtatcgcgtgtgcaccttggccagctcgttgtccgagagatcgagcacctggtaggcaccgccgcgagcgaaacccaacggagactcctcctcctgcagctcacggatagcagcggccgcgtgctcagcactgggcgagtggaacgacaggtgaacgcgagccttctttgcgtcggcgtagcggtagctgaactcggtgatgcggacacccaccgcatctagccggcggttcagtcgcaggaaggcgcccgggttctcgtcaatctccacagcaagaagcctctcgtgcgagtccgcgcgctcagacacgaagcgcagacgagcgaagtcgatgttcgcaccggacgtgacagcgacaaactggcagcccgagagtccgcgcgtcttggcgtactgcgtcataccagcaatcgacagcacacctgccggctcaaggatcgtgcgagtgtcattgaagcccgccttgatagcagcgcagatctcgtccgtcgagaccgtcaccatctcgtccacgtagtcggcgcacacgcggaacgtctcggacccgaccagcttcacagccgcaccatcagcgaacagtcccacgtggtccagctccaccacctttccagccgccagcgacgccgtcatgccggcggcatccgccgcctcaacgccaatgaccttgacactgggtcggatctgcttgacccaagctgcaatacccgcgagcatgccgccacctccagagggcacaaagatggcgtccagcttctctccagagccgctggtttgctgcagaatctccatacccacggtgccctgtccggcgatgacgtacgggtcgtcgaagggcaggatcagcgtgagcttctcctcctgcaccagtctgcgcgcctccgccgccgcgtcgtcgaacgtcttgccgtgcagcacaatgtccacgaagtctccgccgtggtggcgcaccgagttgaccttgatgtcgggcgtggccagcggcatgacgatcttggcgcggacgccgagcttgcgggccgacagcgccacgccctgcgcgtggttgccggccgagcagcacacgcagccggccgccttttcctcgggcgacaggctggccatcttgttgtacgcgccgcggatcttgaagctgaagacgggctgcatgtcctcgcgcttgagcagcacgcgattctgcagcgcgtgcgacagcgccggcgcctcctgcagcggcgtctgctccgccacgtcgtacacgcgcgactcgaggatcatgcgccggtagttgggcggcgactgcgtcgacaggcggcgcacggcggcgcccaggcgcggcaggctcgagcggtgcagcattgccagtgtgcggggatcctagaatgacacaattggagactggccgcgacgactcaaaacgctgtttccaccaatgaggccctgtttttagcttgttatatttttcccccttggaggaattgccccgttgtggcgcttaccacaaagaacgctcctgcgggtccccgcagcgcacgacggtgaagggaaaattccggcgttctttgtggctgatttcccgatgtggaagatgccacaactgaacctcgttgaggcatcttccacatcgggaaatctgtgacgaggcgcattttaagcgggcttagattttgttaagcccacgttgaagaaggtgtgaagtactttgtggacttacgaacttccagcaacttccaggtcaacgcgggtcactcaggctgagctgaggacgctcgagcgggcgttcaaggtaaacgatctgcgcttcgactgcttcttgtggagctctatcaatggaaacattgtagggtatctcgaaaaatactagagactactccagtactttacctacgttgaagtggatttatcgatggacggaggtgggagacgagttggatagagtagccgtccacactgacagttgaccgtcttgcgtcccagtgaagagcttgcgcttgtctggtgtgatgcacagcgcggtgatggcgctgtttggcatcactttgtggcgaccctggagctcaataatccagtcgtccttcttccgactgcgttgggtttgatctcgagcgccagcttgggaatacgcccagatgcagagggtgccgtcagcgtggccggtcacgacgtgcttctcggcaccccactcgcacgattctccgcggttcaccgccagcgatgtgatggaaaccggagagagtgcggttgggtcctggaagatgacaacgctgtcgtccaggcgcacgcggagcgctccattgatgttgtacaccccaaacgtggatccagtagcgacgacgatgtcgcctgtcacttcattgatgcatatcgccgtaatgcttctggcaccagtgacagcatctatcgacggcagctgacggatgaacctgcggcggttcaaatcccacagaatggcaacgccaccggcacaaccactcacgagaatgctgtacgcacgactcgcctgcagtgccgttatgcgctgacaatgggcaggcgtcccaactgtccctattagcgtaagcgagcgcgtgctggacagtcccatcgttgtgtacgtacgacggcgatgaggaccactcaacgatgatgctgccgctaaagatgtcgccatcgctgcagctgaagaagacgtagccgacgcggatgaagtccctgaagcggcagcaattgatgcagccaaggagcgccggcttgaattgaatctccacaaacgcagcacaggcaaacccgggctactggtgatgacaatgcgaccatcagtcgtgattgtagccacatcgatatctacatccagttccaaggatgcaaccaccttcgagtcggctccatggccaccaatatctgtcgaaccggcggtaataaacttcaccgagcgatcttggaaaccccacgcgagatattcattgttgcgtggaggaatcaaaagacactttacgccgacagcagcgaccctgtcctcccgtccaactctaccacttgaccatgcaatatggcgaatgctagtgctgctaattggcactgcgctggaagtttgctgtccacgtcgatagaatgcaagaagtggattcacaggaacttgtcgtcgcacttcctgtttgagcagggccgagttctcgagaactggagaggggatcgcttctgtcgctccgacaaaagtaccgctaagccccggaccactagataacatcgtttgcatccgcgtaatgagctcgcctccttctagaaaggaactcgcaagagcaacccgggcagtcaccggagaagccgcagctctgttgctatcagtttcaataccgttttctgttgaccccacttgacaattggtggatccggataaaggccccaatgagcctccgaaaaacgaactgttagatgttactggtacggcggaagctgctctgacgggatgcggagtccgaaagagctgcgatggagtttggccaaactcagtgatctgtagaattgcgcgtttagtcgaagggtccgtgatagcatccaaatccactgatccttcgtacgtgaggtggtagaacacgttgcaggcttcaatcgctgctgggccctgctgcttgaagccgaagatcagatcaatccaatgatgcaaattcgccgatacgtatgggctttcgagtgccgccctattcatccgcacgaattccgtgggtgaaccattagcccaaggcggaagttccacatcaccaacaacaacgccagtctggcttgttccaaaggcacggtcgttcacgttttcaagaaactccggcaagtagaaaaactctggaatgagttccttcacatcttgagtgccgttttgagcaccttcgaaaccagctgcgcttttccaagcaccaacgatactcgtaaacaatctgtcagcatggtcgtacttcccaccatgaagacgtcggaagtgagacgtaaacggctcgaggcgcatcagatagtgaagagtaatggcggctgatgaatagtgtgtaccataatgaaatggtcgcgaccctagcggattatcagcggattcatcgccgtcaacagtgccaaccgattccatcaggccttcgtaccgggtgcgaaactcctcttcacgacggattgcccccataggtttccttagatctcgatacacaccagagtcgctcaaatccaaaatctccgagtcgtaatcagccaacacccagggaaacacagggtactgagtaagatcgttgtaagatctcccagcaagggtgttgaggtgcatgaggtacgcgaaattagatatgtccccttgcacccagcgctcggtcatcgtgttgcgcagcaatttgcgcaactgggaatacaaatcgccccccgacgacactccatctagaccactggctgcaccttggacgttagggcatttgttcaagagcgcatggaaaaccagctcacgctgttcgggtgattcgagagtaacctgcaacataccaaatgtcagcacaattgcgctacaaatgatgctgagtcttacaaaacttaccaggtagtttctgccgtcgtttgcaaaaatctcgagcgccacgtggcgaagctgataccttcgcttgtgcagctctgtgatgtcttcataagcccaaaatctgcattggtggatgtcttttgaccttgttaccgtttgatgaacatgctggggcgactcttgcaaacgccaacttagccgacgttccagcaacgtggtagatcccagcggaacctctgttactcgaatctgtgaactttgtcgagcaaaatcgttctcaaggctaccaggtggagaaggtaattgctggtttagtcgctggtagttgtcaatgatgtaaacgtgatcattgcagagcaagaatacgcctggacaagaatccataccatcgattctcaagcaatcgtagatgtctgtgatctcgtctccgggtaccaaaagcggccgaagcttttcatccacaacttcttctatcgccacattactggtacttgcagcgctctcggcaatgactgagttctcgacaccacttttctcacctgccccgacctctacttcaccgtcactttcatcgccattatggatactctcctgacgagttgacagtcgtctaaagcgccagctttcgcgtcgggatggacggcgctccttcttcacgtatttgttgaataatgattcaaatgatcccttccgcagatgctccctcgagctcagcaccgcagaggtcgatccgccgctggatagtgctctcttcgtggcgattaagtggtgcttggccggcacactttcgtcagagcgctgccgcgtcatgcggttctttatcgtcgctgatttcacccgagacctgccagcgtgtaagataacatctgactccgaattacggcggcgaggtcgttgcaggtcgttgctagcttcccttggagaagaattccgcgttcgaagtgacgcgcgggttccacacaagcgcggtggggatgatggctggcctctcaatgtgtgcacggtttccggtgactgaactattcgcgaaagccttttacgcattcgatacggaccttctgtgaaatccaacctccaggagaactggtgactagtcgccggcaccagctcatatctgcttcggtttgcgatctcagccatcagcatagagctttcaatagccactgacgcattttcaagagcaattcgttttgagcttctttcagcgggcgatccaaatacatttcgctcgaattcgagtcggagcttttcccattggcgcacaataaacttttggcgatctacacggtcttgcctccacttaagctggcgacggaactctgtttgttgtatgcgcaataaggactcgacgttctccatcgaaaccaaccagtcacatcgtgcgtcgaactgcttttcgtacttaattcttcggtgtgcagctttcttgtggtatgtcgcccatatctcatggacgctttccttgttttccatcacagcattgatatatacacgatccaggctgctctccagttcttttaaaggcgggccaacaagctcgagccactttgcaaacctgccaaacgaaggcgactgcacgatttcatgttcttgcagtcccttagatcttgtagcacattccaacagcgtgtcgaagccgtttttcatcaaatttaccgaatagggaggtgtgccgcttttccgaatctcaactgtcagtaaatcatccatgaaagcccgctgaagcaggatgagatctacccagagctgtgatgccacttcttgaaggcgaaccacactggagtcagcgagtagctgtagtaaataccggcaaaaacacgtcaggaaaattttgtcctggttattttgtgagtcgagcacgacttcacggtgtagatggatctgctggagcatggcttccagttcgacatccccgacctcggcacctcgaccatggaaaacgtgcaaaatcacagcgttcaaagcggaatacagctccgagaataaattctcaagctctgttgagcgtgtcatgcggcccatcagctgccggagaggtcgcctcttctttcctttgcttagcgtttcagaaagtattcctccgagtgttagtggcgccgcaggagaagaagatcccattccattagcaccagcaagtccggcgtttgcctcagccaaaataaagagaacaagctccaacaatcgagatggtccaccaataaagtgcgtttgcccacaacacgcgatcactgctggacagccgtcaccgtgctgagcacgctgccaacagtgcattttcccaaccacgaatttcacaaactcgcgcacattcaccccgaagcgcttgtgcttcgctaatatttcttcatccgcaaactttgctcgaatgtgatccaggaggcccatgacgacaagactttggaaacgcaaaagcagcccattgtgcagtggtggtagcacaaccgatgcgtttgccgtgccgtcgatgaactcttccacaagatcctgaccgtttggagcatcaagcaaaaacttcatcaataatgtgattaagagccgcaacccacgcgctgcaaccgtgtggtgcaagaagggatcatttccacttgagtccgacgcagctgcttcctctgcgagttcagcttcacctaccgcgatgttatactcattcaccgcgacttgcttgttctgtaacacaatggtaatgtgctcttgggagtgcggatactgctcgactaagtatgccctcgcagctgcgaaaattaatcgagtcaactcttccatgaactccagcggcattttttcgccccccgaaagaaacaagctgggcaagcttggcatcttttcaaatatgtgttggagaaagtcgaacacttcagtgtgatagacattgccttgatcagttgggcgagttggtgctgctgtagctgcattgatgtcgatgtggcccccacaaacattttcctcgttcaccgcagtcgctggaatcgttgataaatcttcagcagctgaatctcccatcgtgtttaccattgctacagggtcattgtagtgacggcggagcagaaccataataacaattagcatgttagagtttaccacatgatctctctggatgttcgcttcaaaatcccggcagaggtattcgctttcaaagcgtatttcaagaggcacgccatctatgggcgcccccaacactgcaccaaatagagcataccacatcttttggaacggaaaacatcgtaaatcttcctccaccgcaagatgactgaatactgcgtgattgcagggtaaaccttgagccaagagacgatagtaaccctctttcttaaaaacagcctcatagcgcgcatttccaagtaatgcgcaaagcagcctcagcgctgcaatgacggtagacggagcaacacccagtgaaaactcagtttcttcaccaggaaacaaaaagtactcaatccaacgtagccccaaatacttgcgaaatccagtcaaccgagacggatttgataattgcattcgagatgccccaccgctgacaccagcggtagtcgccaaagtgaccgctctagattccccgatcacagccgtatctgataccgagccgtcatagtcatccccgtgatctttgttttccttaatgtcaagcttttgtaccgcttttagtaaagtttccagcaggagctcctgaacgttagactggtgtactgcaaagcgtgcgctgggttttggctgacctggattttccttctgaccatgttgtacctttgcatcccagaaagtaccgtctagtcgttgggagcctcggggactaaggcacagcctgcctgttggactggcaagtgtgtacgtgacgaattccggcttcacttcaatcgcatcgactatttcagcttcacctaagccaccattcacatccagctctctttgtacgctgatttcttcttcgctaacttctcgccaatgacaaccaaagcgtggagacagcgtgccagcaagaaagctagtaacatccgcgaaattcgattcaagggttgattcacgtgtggggctcgtcaaacacactaacaccacgtctacgatgacgcgtaaaatatcgagtgtgaccgtcgggtccatcagcacgtacaataattgccgaacgaaactcaccgactgcaattgtgtcctgttgcgctcgcgaatagattcatcatccgctgctaagcatgaataaagggtcgaaaagagcaattttgctgtagccgtccccggtgctttctgccagagagaatagtccagaataaagtactggagtgcctgcatattacgaatagcactctcacgctgcacttgtgcttttgccagttcaatgtcgacccccacgattcggaaaagaatttgcaagcatttaggggtcaagtagtgtgccttttcatgcagaagaaaattcatgatcccatacccatgatcgttctccatccccactaggtttcgagcgttgcttcgcatagaaagccacaggaactcgagagccaactccacttcttcttctgtcgaggcttcgtcaagtaacccaaacgcgaattgacatccataattgctaatgctaaacatggcatccaccatagtcgcagccttgcgcaagatagttcctcccatcaaatggccagtgggacgaccatcgagcttactgctgggaacaatggtcaactctttctcaactgcattccgtgcagaataagccaccacgattcgctcggacggaacaggaatgtggatcatcggcacagaggtgggaatacgagcaaagacattagcacttgacttgatatcttggacaatggctgccgctgtacttgacgccgcggaagcaagcgacagacttcgacgaagaagcttgttgcggccaccgcgctccacgtcgacggaatcgataagcgaccgaaccgggtcccacagatacgagtcaagcatcaccatgtttggtatgcgtaaatgatcatacgtgactccgatttcgttgtttccagctacacctgagtataatttgtcatacgatggacctgccgcaaacactgcatttactacaggtgctgaaataggaaggtctagcaaataaaatggccccagaatccattttgcactggaacaccggcgtgcttgagatggtattccaaccaaaccacttaaaggttggctacccgtgatgctggatggataggaaatcttcacgttctcctgtagaattccgtttagatagcaagacaccatgctcgactggaaacgctgtttggcgtgagtaatcacgacatggtgccattgccttgtgttgatgggagcgtgcgtgaattggtagacggatgcacggcttgaacttgttcgcatgtacagcttcccccctttaataaacgcttccgtaacagacttgccatcaatcgaacgaagtcggaaaagataaaatatcggcggattgcatacggcacactctcccccacaattcaatagtgcctcaatgcaccctcgacatgctcggtgggagcatttcaatacgtattcgtcctgtaccatacctccgcaatgaatgcaagtattcgacaaaaagcattcacggtacagcttctcacgctcgtcttttcgctcaaatgaatccacacgaaaccataccatcacagaatagccatcaggtggcggccatatcttggagttgtgagaaaaggatggtagcgacgacgaagttgctgatgctgcttccactggagaaatcacgcggacgttaacatcgggaatttgtaggcatccaaaaccatctttcgatacgtcaaacgcgacagctggagcgccctccgtacgctcgaacgtcactgacgttagctttaccaatagcctcaacaaactcgatacaggcgtcgtggtcgaagcagcagtattttcatgtcgcggttgcgcgtctgtagagttttgtacgatcgagagcatacgctccttcttcatcgattttcttgactgcagtgatcgatcgcggcacaaacacagcagcatcttcacccaatagtctgctgctgtcaaagaaacgctggcgatagcaacgctttcaacgagagcaacgacaagctcatgaaatggattcgtttcccaaagtagcgcttgcgacagctttccttcatcaggtgcacatatcgcacttgaacgggcaggttttgctgtaaacgacctcaacaggacctccaaagcgttaaccgatgcaagacgatgagcattgttggggcttcaataacgtatgaacgaaacaacgtaagataatttaaaagcaaagcaaaaaataactagcagagcgtttatcacttacaatgttgcgatgcgcaggaaagcatttagcagctggcgagttgaatcctcaccgagcatagcagcatgcaggctcaaaatctggattccgatgccaaataactggggatagttcaatacaccaggacaaatacgatcctcttcttggttggcggttagccgagatggcttatcgaagcaaatccatgcataatcaccgagagaaaagccaatgcagtagcgcacgcaaaaatacacccgtgaaattgcactttgaacaatggcatcgtccgctggaagtgcattatctgcccttgccagaaagttgccgatcaagttaccgaaagatccaaaaggaacaagtctacacacgcaaaaaaatgttatacttgagaccaaaatgtgtggttggattgcattgacagtgcgtacctgcagaaccgttgctcagcttctgaactagtcgtaacgatcgagaaaatggattgtagtgacagcgtcacagcagaaaatgaagcagaaagagtatcacaggtacttgtaccatcggcactaacctcccacttcttcgttacagcacaaataattcccaaaagagatataaggacatcacagtcgagcagagctttcaaaaggcgttccctcactggagtcatgtcaaagcaaataccttgcccactggaaactccagtagactttgccgtcgtagagactgatttgggtcgcaatagtgcgtcaagatatgcgagagctccttgtaatactgctacatcccccggaaatgccagcgtaacttcgccatcctccggaaagaccgccagagttacgtatcgcaaggcttgcagaaagctgttaaccacatttcgaaggaccgcgtcatcgtgctccactcgtaatgacagcgcgataatcgatatccatagcgaagcaccctcttgttgaaaagtggtgtttccagccaacgtgcaaacacactccagcattggtaatccacacagtgtacgttcgcaatattgtttgtccctggtagctgtatgactttgaacaccgtcagcaaccagtttcatgatgtcgacgagaataatgtagtcagctcgctgcattgcattaccgcactgtcggcgtcgtcgcgccctttgatgacaatgagacgctagcatcgagataattacctgctcgttgatagcagttgattcgtcgggagtgccactagtctgactggtgcttgtagaacttgttggatactccactctgatctgcgtcgaccccgcatcagaacatacggtgcttgtttgatcaagaaagagtgccaccagcgtactcacgaggccgacagagcatagcacttcgtgataggactcatcaaaccgaaggaggtttgcgataaaagccagtattgcatggatagaatgcttttgaagcgtgtcctggatatcatacaccaacggttggtacatgtacatactatacaaaaagtatatttcaacgtacgcacgcaccttttggatgaacgcgttcattgaaacgagctcagcatacgggataactcgggcttcgatagctatcgccgagagaactgacatgatagtgtgctgagcgatttccgaatagccatcgatgttttcgatagcctgcgcaagaaagcttgcgatctgtctcaagcaagcagtcaatcttcacaggttagccgtgagcatttttgcacaactccaaacttccgaacaaacaagtattgcgttacttacactcacgaattcgtagtcaaagcgactcgtcacgacaatttgaccaagcttttgaagataacggcactcaagtcgttcgcgatcgtccaacaacttggcgcaggtttccttgttacaacgatgctcttcttcagtctttgtcggtcggtgtaagtacgcaatgatatccgaaagcaatccaaatgcttccgagttaaacagagactgcccaaccaacttctccgtcgaaatagtcgccagcttaaatgccttgttttcgtgaatattgtttcgcggtaaaggatgctcattccctgacaggcatagatctgccacagcatccgccagctcttggtcgtgtaaatagatggcttcaacagcattcggagtagtatcttcagcgcatattgcatgctgtcgaaactcgaacagctgcgtgaaggtactcataattttctgtcgttgtcggcccgcgttcatctctcggtgcaaatccagtagtccagacgcaaaagcccgtttcatcgatactgctgtgaccgataaagtcttggctaatacacccgttccgttggcatggtagatcaaatcgacaagacacctctcctcggagagtaatttcaccatagctctccatcggctctgctgtaggccctggaccaaagcctccactacctgacgagacacgatcacaacgtttgagtacgtagttcggctagattatccactgttgcaatgcgtaccttcacgacattcagctgcagtgtttcgtcgcggaatgccaagtgaaaaatcctgtgtagcgtgctactctcatttaactcctgcaccgcatcgggcgacgtaactagcactgccagcacatccagaatcacttgtacaagctcatcaacgccgtcttccttttctgcatcgctcagtgctttcaccaccttgaccaatgtggacgggatcctcgcactaactagcagcagagcttgggcattgtctcctctcacgagcaagaccctcaacacctgcaacagttgcagcacgtgacctctctcgccactttctgtagccaataggaacttggcattagcattgccgtcaagtctcccggcattgaagagctccagcgcgcgactgaagcagctgcgcagtctctggctgcccacactgacgagagtgttggtatctcgcgcgctcagcagcttctcagcgccctccgaggcctggaagtcggccaccagagccttgtggagatagctgagcgcttgccgttgctcttgggcctgcgttgccgtcgcgaacacctccacttgagcgtgcagagcgtcaccaccgacggccactgcggcagctcgattctccgtcaattccgggccgattctggccgcagagcccttgaccgacgcagaagccgctcgcctaggagacagcagcgaagtctgcgcatgtgcgtgcgtcgggctctcggacgaagacgacgccgaggggctgcgcacccgccgctggaaaatgcgcttcatgttgcggagtgtgggtcgcggtgcttcaagcggtcgtgcagcgctgattgggttaaaatccttatcatttcaaccaatgagaaggctataaactattgctccgaggccaagctcaaggggaagcgccggacgccatgtcgagccgcagccagaccaagaagctgacgctgacgcgcgtgaaggacctctcgccggcgctgtgcaacaaggagatcaatgtgaaggcaatcgtgctggagtccaacgccaaggacgaggccaacgccagcaacaacgccacgttgctggtgggcgacgactcgggctgtgttagcctcgtgctgcccaagacggcggcgctgcacgtgcggctgggcgacatcctgcaattggccagcacgcagctggtgctcaagagcaaccgcgtgtatttatggggcggcaaggtggagcgcgtgggcgagttcctgctgctcttcaaggagagcgccaacatcagcaacatcacgtgggtcaaggaccccaagaacccggacgtgctggtcagtgctgtaactcccgactttaacaccttccagtgtactgtggtgctatggcagtagcaattgttgtgatgatctaatatgagtcgttgctttgtggttatgctacttagattccaggacgcaaccccgctaagagacccaagccgcaggctgccaagtagttgagtgcagatgacagacagtaaagagggggtgaatggcaagtgtagatcgtgtgcaagttccaggttgttgtggagaggggtatttagtgttgagcgtgacgcacgttgtggatgtagatgtaaatgagcacggtgcgtcatgagttgaagactgctgcatcgattcgagacaagatcataacatccgccctgttggctatttctacacgggtatatgcgcaagtgccttagcagcttggttcgtgaggctccataattgtggctatttgcggacgactacaatgcaacggtcttttcagtcgtgaatgacaacactgtgagtccttgctgcatcgccctcttagcgtcgatctcgttaactagctcctgtgcatgaccacctcctcacgttgcttctcacgataaagaatcgtcgggactctggctgcaaaacaggctggatcggttgcagatctctaaacggcatggaggatggacatggcgaggaaatacagcgcgaggcaacgccgccatctccagcggaagagaacgagcagattcagcctgaagtgcggccggaaagggtcagcttcacctctgagcgacgcaaaagcattcaccgacagagcattctatacccattggcgaccgacttcttacctgcgggctcaattttccacgacaccccgaggaagcattcctcctctcacagccttttcccccccgatgtggcgcttgggcataaagttcatccaggcgatttcatacgaaccagcacagagcaaacaagtaccagtaagtttagagagacccgagcacaaagcgagagaaacctcctcaacgctgaaatcgcctccgctacggaacctgttgcggtgcaagtcgacatgcaaacgttccccctgcgcttccgcgatattgcgcaggaagaagccttctgtaagcacttcagcatgtatgtgaccaacaaggtgcgcatggcaagccgtatcgtgagcctgatgaacgtggtaatgctggtggcgcagtatctcacgcaaactcgacttctgtgcaacttcgtgtttgtatcgcgcgttgctatcatcgtgtggtcactgatgtttcaagctgcgacgtacactagctggttccgcagatattttgaccgactattgctcgcgcactacgcgatactagacctcctgcaccagcttccgcgtttcatatttctggtgagctcgatgaaggaagaagaggtggaagcagactcaagtggaaacggggaacttacgcagttcgcctcgcaaaagagcgtccgggcgatgaacttaatatttattctcatcatctacattgcaagtggcatgcgcttcacgttggcgtcgatatgtgcgtcatggcacatgctggttaaggggcttttcgcagtgattttctgccatgcttgcgtctgggatgatttggatgggactacaaacctggccatgatggcattctgcacacttacagcctatcacagtgagcgatatgtccgccaggagtttgtggagcgactgagggtcgatgaagagcgcaaacggcgtgatgatttactggagacaatgctgccggtgcacattaaagagcgtttgaaggataaccgcactgatgggctggctgaaagctatgacgaagtgtcgattctgttttgctacgtgagcaacttccaagcgctttcgaaacacgcgtcagctattgagcttgtgcagcttatgaaccgaatcgtgttttgcttcgatcgagctacagatgcccaaggagtttataaagttgaggctattgctgaaacctacatgtgtgcggctggagtgccgcagcgcgacccatttcattgcgagaaaatcgccgatatggctttgatgatgatgcgaatctgcgaaaaagaatcctggagcttcaatggcgtggacatccagctgcaaattggcattcactccggtcctgtggttgcgggtgtcgtagggtgcaagacctacagttatcatctcttcggcgacacagtaaatacgtcctcccgcatttgctcttccggcgctggcaggatccaaatcagtgatcgatctcgtcagcttcttgctcgcaccggggccttcattatttcagagcgaggcatgatgaacctcaaaggcaaaggtatggttcggctcttttggctggaaggcaagaatggcgcaagcgacaaattttcatacccagatgtgtcccgcgattttgagactgctgtggaagagtctattcgcaccaaggatcttgagtataagtctccacttcaccaccggagcgatgactatctaagctgcatgaaggatgtcgagattcaacgcctaacgttagactttcatcggaaacgttcagcgagtggcaaggttgattggatgaaacttgctgcaaaacctttgcgaccacaagtagcacctgacaacaactttgccgtggtcacttcgaatccccagcctcaagtcacgggtgctgaaggcccacgacatattcaaagtgtgaaggatactgctagtgagatggaaaaggcttttcgcatcgagcacaaccgcgacagcacaccgcagttctgcatgtcactacaaatgtgttctatctacctgctggttaccattatttacagggcctacaacaaggaagtatacgcggacaaggccgctcgcagtgctcgatcgtatacgatttacagcgtcacgattgtctcgttgctgacaattgtgaagttactgcgaaaatacccacgccttgctcgactgaaggagaaatggggtactggaaccgggctcgtgtttatcatggctttgaacatccagctacttgcagcgtccgatacctcttccttgaaagactcgcaaccgagggggaagcaaaagattacctttctggatggaaatttactccacgctgtgatagttggcttgacgatgagactacgtttccgcaatgctgtactggtaaatgcatggggtttcttggtgtttgtgatatgttcatcgatacgacaagctgagccgtgggcggatatgtccgagagtttttacctgatattcacgatagcgtggatcgctgtacacttcggatacaagcgagagctcggcttacggcacgatttcttgttaaagtgtacacttcagctggaaaagcaaaaatgcgaggacttgctgaccaacatgctgccatcgaagcaatatgccgaggcactcatgcagcaatcgaccattgtggatgagctggcagaagtaactctactgtactctgacatggtaggttttacgccgctggggtcgaagctcgacccacaagcaatctgtgtgatgctgaacaagatctactctgccttcgatcgccatctcgatgacttgggtgtgtacaaaatggacaccgttggagatgccttcatcgttgtgggcgggctacctagtcataagagcagcaagcaccacgccgcagcgattgctgccttcgctgtggagatgcagcgtgaaatccaacgattctgtaaagaggaaaacgtggcgctgcagatgcgcattggtattcacacaggcaatgtcgtgggtggcgtggttggtatcaagaagcctcgctatctcatttggggcaggcacactgttatcgcaaatctcatggagtctcgaggggtgcctgaccgcattcaggtgtccgaagctacgtacgccctacttcgtgattacccagaatttcgcgtcgatgagcgcactgagaacgttcagatcagcgaaaacgacaccattcgaacgtatttcttggcgccagatcacgcgactgtgaaggatgatgtaatttcccgctatctgcaggagactcgcatggtgaatacagctgacgtgtatgccctcgaccagcttcgaagctgcttgctcccttccagcaattccccactttcaaagcatcttgaagtcccgctaagcagtcggcgtcattccgagcgggttgccacatcgggtgaagtaacatcgtctccacccctgctagtgcgaaccagatcatttggtggtaacgaataatagagttcgcaaacagtattattctgtggtcccagttgcaagctattcgtacttgttttacactgaattggtgtcatcgttcatggcatgcggatagagtgacacaactaatggcggaaccggttcaggggctgaatgagggctacccttcagagtggcaggcgtatgcgtgtgcaccggattacttgttccttgcacatagtgaggaagtcgctgctctggggcaataacagcattaaactgtggtttgcgtcgagccagtgggtcttctctccgttgacgctgttcaacctgctcaatccacgtggatgcacgcgccttccgaaatgaatacttcgtgacggacggtatttcagacgtcagcttccattcaccggcgcaatccattgaccgcgagtcaggacgccccccccattgaccaagtcgatcgggcgcagcaacatcctgaatatgcaaaacgagtaatgaataataccgaactcaaaacctgacaatgtggaaacacttacgccttgtttcataggtggtgggtctgtaagtagacctctcggcttcttcatgacatcataagacccaggtccaacacactcgggtgtagaggttttctagaaaaacaacagtgagctcttgttgggtaaatttcacgataatggacgcgtttgtacctgtgtaaagcgcttggtggtactgcagagactagtgccgcgtaaggaccctgagccacagcagcaaacattgaagtgagtactgtggatatttagaacgtaccggctgctcagctcttacggtggacgtcatatcccagcgagtttcggttggagctgtagagttggtcggcactgaggcactcgttgcggaaggcggtgcccggctgcaccgtcgtcttgggcagacgagggtcgatactggggccctgagtcgtccacatgcgtcttgagtcacgcgcgtaaacctgtcggtccggtggccgcccgccctttttgagcgccgtgttagcgcgcgggtcgtagaagaaggactcgcggaagggcgcgtacgaggccctggtgatccccacgcagcgtatctgcgagggagtcaacctgggagggaggactccaggaccatcgtggcctgcagaaggggttcctgcgctccgacgcatcgacgcctgtatgccttgcggtaagaaatgcttttttttgaggtcaacttcaaccttaccaccgaaatagatcggatacttttagaccaatcgtggtacgtacacatactacagtagtatcgatgacgtcagatggctacataagctgaagtgcaccatgcatgtttgaaagtgggaggcacgcaatatgggcaacaaaagctttatggattaaacgcagcgaaggcaagaaaaggtaataagatctctgttctgtagatgccgagccactaacctctcttggagttgtagatggctaaactagtcacgagttgaacaaaggcggtcagcaaggagggtcgtaactactacgacgcgtctacatcatctcatccatttcctcgtcctcgtcgaactcgccctcctcctctgcggtagcgtcctggtactgctggtactcagacacaagatcgttcatgttggactcggcctccgtgaactccatctcgtccataccctcacccgtgtaccagtgcaagaaagccttacgacggaacatagccgtgaactgttcggacacgcgcttgaacatctcctggatagcggtcgagttaccgatgaacgtggtgctcatcttgagacccttgggcgggatgtcacacacgctagccttgatgttgttggggatccactcgacgaagtacgacgagttcttgttctgcacgttgagcatctgctcgtcaacctccttcgtgctcatacgtccgcggaacatacacgcggcagttaaatagcggccgtggcgagggtcggcggcacacatcatgttcttagcatcgaactgctgctgggtcagctcgggcaccgtcagggcacggtactgctgcgagccgcgcgacgtcagcggggcgaaaccgatcatgaagaagtggagacgcgggaacgggatcaggttcacggcaagcttacgcaggtccgagttcagctgaccggggaaacgcaggcacgtggtaatgccggacatggcggcgcacaccaggtggttcaggtcaccgtaggtgggggtcgtgagcttcagggtacggaagcaaatgtcgtacagggcctcgttatccaggcacatgacctcatcggcgttctcaacgagctggtggacggacagcgtagcgttgtagggctcgacgaccgtgtccgacaccttaggcgacgggcagaccgagtacgtgcacatgatacggtccgggtactcctcacgaatcttggagataagaagcgtacccataccggaaccggtaccgccacccagcgagtgcgtgatctggaaaccctgaaggcagtcacagctctcagcctccttgcggacgacgtcgagaaccgagtcgataagctcggcaccctccgtgtagtgtcccttggcccagttgttaccggcgcccgtctggccgaacacgaagttgtccgggcggaagagctggccgtaggggccggcgcgcaccgagtccatggtgccgggctccaggtccatgaggatggcgcgcggcacgtagcggccgcccgtggcctcgttgtagtacacgttgatgcgctccagctgcaggtccgagtcgccgtggtaggatcccgtggggtccacgccgtgctcgtcggagatgacctcccagaacttggcgccgatctggttaccgcactggccaccctggatgtgaacgagctctctcatgttgtcgctggtctgtcaggaggatgcaacaaggcgtcagcaaaggcaaagggcaaagatcgcgggacgtcccttcccccttttccccttcgtatggctctccgtctggcaacgcgccgaggggggaggggcaacaatgcccccccccccccagaggggagactgaagggggaggcgaggggggagggtgcagtcaggaggcatgggctgtacctgttgctgtacgtgcgcggcggcgggtcctgcggcggctcttggctggctggcgcgggctctgaggagaattcggacttttggcgaatgaaccagcctgtgttgcgccggccgcgttgggacgcgcgggaaaaattaccgctggcgtcaaatttgggcttggcgccgtttcaaaacggcgacgaccatcactcctgcaccatacgtcagtcaagtataagcgcgtggacaggccggcggatctgaaaccactggctggtttgaattttaggacgggtggcacggcgatttagatacccgtttggctcggaaccagggaggggtgagactgctggccgcgcgcccgtttattccggttctaccgcaaattttgcggtgggggccggtaattttcgcagcgcggcggcgtaaattaccgagccaaacgtggaaggcggtttcgcgtttgaaaaagcgcgcgtaacggacgccgcttcccaggttgcttgttgcccttgatgccaaagctcgaggcagggcgttgttggcgttcggaggctaaagttatcgcgcgtgaggcgcagacactgcgacggcggtgccagtgcaattgcggccgctgcaccgtcgcagctagcggtgggtccaaatccacaggcatcagtgcgtctggcaccgtgcctgctatgtttgacgcacgcaacagatatttatacgtcgccattcgtccatgggatgcacattgtgcaaccacaagctctgcaggccttgcagccaccgctttcctgcgcaggcaggtgagaccggcgggggcgaatctcggcggggctggttggtcgtggtgtgcgccacacgacaaatgggccactattgagagcacgcatatccgccgcattcattcatattgacgagacacgctccgatatcagtgttgttaaaaacccacctttttcgacaaagttgggcgggtgattgaatctatctgggggattgggtgaaagtaggtgggttttctatttttcataaaattcgacaatataggcttctgattggctcgtttggtcataaaataatttatccttggccagctattggactgtttgtcctaatatttgcactgtaactctacattataggcaaaaataaaacctgtaaaagccaaatatgctggcgtagggtgggtgggttgccccaatattcctttgttccagtaagcaaaaacccagcttttacaaccctgtccgatatgctgcgccgcgcgctgctccaatacttgcctaaggcggcgctgcccgcgcgcgctgtgcggctgcaccaggccagagtcttctcttcggccttgcccgacggctgggaggcaatccgccgcaggaacggtgcgtacagtagccactagcgtgtcatgctgttcttccagcactgataagcggtcttggttgctgctgactgagtaggcgaagtgatgtactacaataaggaaatgcgcaagactgtgcgtcacctcccgggcgtgaatccgcaggaagtggctgcagcaaagcccacggagcccgagccgaagaaagacgagagccaggagacgacggcggccacgctgccccaccacgagagcacgggcaacgaagtgttcgtccccatcaactttgacacggccatgtccatcgagggtcacgactcacaagtggtgcacgtacgacaaagtcactggctctgcgtggttcggtctcgttgccacacgatctcactccgtcttgtggtgttgctattctgcagattgagcttgagcccgagcaatgtctgcgcgcggagacgggtgcgatgatttacatgaccgaaggtgtggaaatggagacgaccaccgctggaggtttcggcgaaggcatgaagcggtatgtcaatatgttgctttgttcgcttcagcattgggctttgttattctaacatgcaactgcgctattgacatgttgacagcatgatgacaggagaaaacttctttgtgtctcgcttcacgtaccacggcagcgaaaaaggcaaagtggcgcttggcacgagctttcctagcaagattgtccatctccgcctgagcgacttccttggcgagtctattatctgtcagaagggggcgtttttgtgcggatcggataccgtcaacatcgaaatggtttgtagcggcttcaagctcgacgtgtagacgggataacgccgctaacatccaccccattcatcataccgaaggagtttgccaagaagttcggcgttggcttcttcggaggtgagggattcattttgcagcggctaacaggaagtggcgatgtgcttgttcgcgcctctggaacgttgattgagcgcgagctgcagccaggtgaagtgctccgcatttcgagcggctgtcttgtcgcgttcgagcccagcgtgcactacgacatcaccatgttgaagggagcgaagaacgtactgttcggcggagaggggttgttcgtgacgacgctcaccggccccggaaaaatctacctgcagagcctgccgttcgaccgcgttgtcggagaaatggcctctcgaatcccccacggcgggtcaggcggcatgatgttcccgttcatgatggatggcggcggtggcggcgaaggtgcgagtgctggtgcatcgactgacgtcggcggagacgaagcgttttgcaccgaaagtgccggagatgatgactggagcgccaaggacgacgatatttatggcgatcgcagcgaggatccgaccaacgggagcgagttcgacgacgtccccgctgcggattcgcaggagtcgggtggcggcggcggcggcgtcatgagcttttttgacagcctcttcggcgacgatgatgagtaaggctcgcacagcgtagatgaagctgcgtaccaattccgactggtttgcatacgggtagcggcaacttgccgctacatgcagctcagggccgttcctaaccgagctacgggaatttaccatatcctggtggtcactggcagaatatgggagaaattttgagggttctcaagggagaaacatcgattgaagtgctttgttgtagctatccaccagtgtttatatctagctgttgtgtactttgaagcagctgcttttgtagcaagctgcatcaattggttacccccccgtctaatcttctgctattccctcctcttgcaagtacagagtccaatcactcaaagtgtaatgccggtagaactaaagcattacagagtaatggtgaagcctccgcggtattatcttcattaacgatgctgcgtggttgctatagttttcgtaattttgactaatgattgaatactgggtccgatttgagataacgcttcgtaaaccaatttactgttgaggttaacaattcgatctatacggcgtgcagtagcagtatgacttcgctttagcttcatatacttcaagcaacaacttacttgcgcaccagaccatagttggggggggctattctctcacagccctgccttgcatagcagttcaagcctcggctcctactcaaaatgaacttctcgtttgccctacgatgccgcatttgaaggaaaggctgcttagccgtctattccttcgtcgcttcgggttcccccagctcttcccgttcgccaagtacctcagtcgaactcaggccaaccagatctcgcacatgtcgaggtgaagccgtccatgtgggtggttctcctcgatgttgcctggggaatttgtggcctgctcaatcttctcgaagcgctcgacgcggatatgcccgagcgccaggagctgatcgaggccttcatgatcgtggcatggatcgtcctgctgctccatatcatggttttcctctaaggtaaggtgccagctgcgtgcctacaaccagttccgtgcctacttgttttagccaattagcatcttctccttgttaaactctcgtagtctattggtagatttttccagcgtcacatgcaatttccggtgatgagcctcctaggatttgcatagcatacaaaaatgctatcaaaaagaggcaggaaactggcagctcactccaaatcaacaagcttttcaaaacaataacaagaagttctgcaaaatttacacggaccagcgtgaagtacataaaatcagcccaatcgctcagatttagcgggtgcaatcagatttcagaatggacaattcaatgaaaagttatgccacagcaagtccgcaagttcgaaggacggcacgaaactggcagaagaccttacttccgctacgactagccgctgtcaacgaagaaaaccatcctcactgcgaatttacacgcgatagccgaggaggaagctaaggcgtggcagaacgaggaggcggacaaggcgctggagatcatgggcagtatccaagaacaacacgaagaatttgagtaccagcgagtgcagcgggagcgggagcttgccaagcaagacggcggacgacttgtaactttttgccgccgtgtattagctgtctaccgcggcctcgaggaagattaacgggtgtgagagcattagtggagtcgccccggagtcgccgagcatcgacatccgcttcttctcctacaaggcgtggcaagtcagcgtcctcctcctcctcgtactcaacgggttcctcatgacgctgttcctggacgagatgtatgaaccccagcgccacatcttctacgactttgtggtcgtcagcagcacgctgcgcatcgatttaaacacgcccagcagcgtggtggaaaccttcagcgaggtgatgcgtttgcggtccgagttcgcggcctcactgcaccagcacctaactccccaggagctcactattgccgaccttcaggaagaattaaaggcgcgagacgctgcaggctcggggctcatcgaagtggacgagctccgatctgtgctcgagaagtttggcttccgtctcacgcggttccgcttcaacagcgtcgtgaagatgctgtctgagaccaaggttcgaggtcacgtacagccaagtcgttcgtcttgaggcgatgactgagaacgagcacctcgttgagaatgtccaggccgctgaatacccggcccacccgctactgcgaccaagtgtgctgatctatgacaacgtggggcaagcaagtgcactatcgcagtcgaactacagtttattcgcttcaacgcgtcagctcccgctggcccagtcaagcatgaaagcggagccgcacccagaccacttcgtagccctgcagagataccggtaatggggaaacaacacacggagcttttaaaaaagttatgctccgaattcggttcctccagccgttccatccaaagctgttcacagggtgtggctcgtgctgtccgagccgctcgctgccgcgaagtgggtgttgtgcagcgagcgcctcgagggttatcgcatgcgcgacacactcgcggagttggtgctcagctggcggcgcccacgccgccctgttcttgagaccaccgggcgcaggcctcgagcatcgatcgcttcgatctctgccggcgtggtccacatgtgatgacgcccggagcaatcctggatccgattgcagtgcaatcggatccaggattgcacgcttgctggcagcagtcgccgcggcgcccaaatccctgccgcaaaatccaatctaagttacactaggtgtggtacgtgtagctgtcgtcgcctgctttgcgctggtctccgcggccttcttgcctttgtctgcagccagcgaaccagacgtggtctccgatgtccgccagccgctttagcgctgcagttttgtggtcgccgctttcggcgaggctgtccgcgatacgaagcacgaccaccaagacgaactcaggaatccaggcggcatatgagcctccgtccagccacaacgcctcgagcgcagcaccgcactcggatggcttcacctcgctcgccgcgtcgccggcagcggatctggccccagccgatgatatctgcgccgcagcaatttctgcagcgccgagcgagtagcgagcgagcaacacccgccccacccatgcgtgtagcagcagcgattgagcacgaggtgcaagccaagctcgccttgcgctgcaagggcaactttggccagtacagtgtaccagcactcgcgtgatttgtcgcctttctgcccagaaatgtccgcaaacaacgctccaaaaagtgatgccggcactccaacgcggacgtaagcgcccctgaccgtgatcagcgaaagcaccgccctgcaaagcaaagccaagaagctcgcaaaaggcaagcaaaagcgcagcaacttacatgtacatgcaaagccgccgccagagctcaccacgggcggcttatcgccggatgattgtgccatcgccaatttatgtaactcatgtgccccaaatttcacgttaagtcgcaaatttccgctcagccgaccaatcagcggctgcagagaaccaccgcgttgccagagacacgccgccaaagcttggattacgcgcggctggcgatcatccatccggcccaaagcaaaccttcatttcggaattcaccgtcaggcactcagatcaccaccaccgcagcgcaccgcactttccaagccaacatgccgcagcctgtcgtcgtcgccgccgccgcccccgaggagcacgcgccgctgcagctgaacctgatcccgcgcctggcgcgcaaggaatcgcagcgcgagatgcccgcggccatcaaggcgccgccgctcacgcccgtgcgcgtggagccgctgcgctggtcgacggcgtcctcctcgctctccttcctgagcaacatcgaccgcctcgagatcaacgagaccgtggagcgcaacggcgtgacctactacgtgctggaggtgttccagttccactacaactcgcgcctgcccacgaacgtcaacaacccgcgcattgccgtcacgcgcctgtccgacgccagcgagacgcgtgagcccgacttccgcgtggagcgccgctactcggacttcgccaagctgcgccaccagatcaggctctggacgtgccccaacgcgcagttcacgtgccagtactgctacgagtacggccgctacatgcgcttcaagctgcgccagccgcgcctgctcgtgtcgctcacggccaagaacgtcgagaagcgcaaggagatcctgcaggagttcatgacggacttcgtcgacctcgcgcagaacccttccaagaacacggtacaccgctgcgaggcccaccagcacgtgccggccttgctcgagtcgttcctccgggattgagcctgcgttgatcctgcatactgtagttttagtattagacactttaatttatccaagtcaacgtgacttttaaccgccatatcgtatctttaggacgttctccagttccacatctacattgcaatatattgtggtccaacatggaggaggagcagggcctccgaaaatagcattgtcaatagcattatttcagaaaataacaataaattacgcatttcggcgggttcagccatctaccgtgataatttattgatgtgctttgtgatattacataatttatgacagttacctttatataataatgttagcgttataccagccatcttctcgcttccagtcgttcagaagaactggaatcactggttgtctgcgttgctagttgcagctcatttggcagcgctcactcttcaattttcacttctcaagcctccaagacctcatccagcatggttcgcgctatccgcccccctcgccctacctacacgaactcccaagtctcggggttttacttccgcccgtgtcgcgacgagaacgacgaggtgattctcgagtatttccgttgccgttgcggcacggttcggaagcaaacccataggaacgggtactccaacctgatgcaacatatcaggcgggagcaccctaactacgagaccgtcatgctcgacactacgacggcggagacaggctccctcgtgaacttcgtccgccactcggcgctcaacctccacggctggatggtttggattgtcatgtgcaacctgccactctctttttgcgagagccgagaagctcggcggtacgtgtatgcataatgtcattgtgtttacattactacggaaactaacaactttactttatggatgttattcagctactccagcctggacccatctcggaggaaacgctgcgggctggcatggacggggtcgtcgtcgccgtcgagcgttcgattgcgtcggagctcccagcacgcttcggcatcatgctcgacggctggtacacgcatctgtgcactacatcgccgtgttcgcgtgctatgaggtgaacggctgtcccaagacaacgcaactcagcatggccccgctgctggacgcgctggacgacgatctctccgcgcagggccatctcggtttctagcgaccatgctgcagcgcgattacggcgtacagctggcgcagtgtcgcttcctcgtagctgacaactgcgccgtaaaccggcggctggcaactcttatgagttcaggcggacatggcgtcgcatgaggaggacctggctgctgtgcaggcgctcatggtaaaattgcgtactctcacccaatctgccaaactacggtaagcgccaatgtgtatgtgtggtgtgtcaatatgtctctaacacaatttgtgtacttttgtattttttttacaaaataggttgaaaacgccacttcggcctgtcattcgcctggacacgcgctggagctctacgttcgagatggtacggcgctacctccagctcctcgagtttcttgacgccgaagacgacggcctcatggacctgctgccgccgccggcgatgaacaagcgactgcgggcattgtaccaggagctgtgcgacatcgagtcggtctcgaaggcccttcaaagccccgacgtcgacctgctggacgttcacgagtggttcgacgagctgatcgctgtcaagccacaatatgggcgctacattggtaagtttataactgttgaatttgtgttcaatattttcactaccaattgtataatggtttttattttgcagggcctcgggccaacattgtgcacaacccagattttgaggctgggtgtgtacgcgttctccgcgggaaggcgcagcggctgacgcgtgctgataaggccgctttgcagcccttcgaagctgccagaccggacgacgcggccgcgagtgaagaggaggaggatccagccgcgtcgttcgtggagcgtcttcggaagcgccggcggcttgcacaggaccgtgtcaagtataagcagctgaagagcatcccacccacgtcgaacgtggtggaacgcttcttcagcattcatagtggcattatttattgtggtacgttgggggcaatgtcataatgtactgttgtattggtaggagcgtcaggggataatttattctgcaacgaccaacctactaaataaaaatgccatattcggaggccctgaggaggaggagttcgagctcgtctgctcgctggacgcgttccccacggacgccgcggcgcgccagcagctctccgtgtcggcggagaccttctccgtgatcaagcgccagctgaagcaccgccagttccgcgccgcgctgcgtctgcaccgcgaggagaaggcgctcaaaaagtacgtgcctcgactcggcgggcgggagaccatgtgccagatcgccaggttcgtggacttctctccgtgcatatgatgacgcggctgctgctggacgccaagtacggctggagcaagaccaccatctccaacttcttcaaggaggccatgaaggacaagagcgagctggacgaagcggagccgccgaaccgccgaggcctctcggagcacgagtacacgcgggtgatgcaggagatccgcgagtgcatcgatggggacgtgtacttctcaccgttggcggatcgcatccgccacaacatgggcgtcgagtacgagtatctgctgctggagacgttgcgctggtattcgagagcgaagacgtgcttcgagagatggggttgtccaagacgcccgatgtgaggttgttgcttccgatcggtgtgaagaaacccaaaagcgggcagctgcatgtggtcaattgggtcgatagcaaagccatgtttggcgaccgacacacacatgaaaaggagaacgcgagtcaggtgggtcgcggtgaatgctgtctgcgtcttcacaggtgaatctaactgcttcgttgtcttgtttagctgcaagggtatgtggaccgttatggtcccgggatggtgatatactggttcagccacgtcgagcagcttagctctgacagctctatattgtagattcgttcccgcaagaaatctcacttccaggagattttgatccactcgcaacggtcacgaagttgggggaaggtgaagagctagtgttgcaacctgccaagattcagacggaattcgacgaggactggaacccggtgcgagctataattttcagcccgtgatgctggagttgccttccccatacttaagtacaaagcaagttgaagttgcgtaccgctaaaatggtacactggatcagctacatttgattggtggactggtttgcatacgggtagcggccagttgccgctatctgtatataaaccgcaataaacgtgttttcgatccaccactgcacttgttggcggaaaagcgcgtgtgaaggcgaggcgagcgcgggccccttcgtctgactcctcgcgatacccctccctctctccctgtgctagcgccatggcggacgacgacggctcctccgtgcgcgtggccgtgcgcatccggccgctcatcgggcgcgagaaggtcgagcgctgcgacgagtgcgtgtccgtgctggaggaggagaaccagatcgtcatgggcaagaaccgcgccttcacgtacgactacgtgttcggcaagtacgtgcagcagagcgacatctggcgctgcgtggacccgctgatcaaggccacgttcgacggctacaactcgaccatcttcgcgtacggccagacgggctcgggcaagacgtacaccatgggcagcggcagctcggtgcacattccgcccgaggactacggcatcatcccgcgcgtcatcagctacatgttcgaccagatcgacgccaagatgcaggagaacgtgcacttcaaggccgtgctcaagatccgcttcctggagatctacggcgaggagatccacgacctgctcgtgacgctcggggactcctcgggcgagagcaaagtcagtctgcgcgaggcggagaacggagaggtgcaggtcacgggcgcgtccgaggttgaggtcgtggactcggacgagtgcatgcgactgctggagaggggcacgctctgccgtacgacgggcagcacgctcatgaacgcgcactcgagtcggtcccacgccatcttcactgtcactatggtgcagcacatccctattggagaaccgcccgctgacggcaaggagatgcaggaaggagactacgagacgagaagctcgtacttcaactttgtggatcttgccggttccgagcgtcagaagcggactcaagcggagggcaaacgtctgaaagaaggcatcgacatcaacaagggactccttgcactgggaaatgttatcagcgcgttgggtgacgacacgaagagaggaaaggtgcacgtcccctatcgtgactcgaagctgacgcgtatgctccaggattcgttgggtggtaacagccggacgctcatgctgacgtgtgtgagccctgccgacgtcaacttcgaggagacgctgaatgcgctcaagtatgccaaccgagccaggaacatccagaacaagcccgttgtgaaccgtgatgaagcttcagcgatgacgatggagctccgccgccaggtgcaaatgcttcagatggaggtgcaccgacttcgcaacccgggactatcggaaagcgaactaaagatggagagtgtggggacgaacttcatcggaatggcaagcgacttcgactcgttcggcaatcttcgaacgcgtgcagagaacgctgaaaacgaggtggctcgactgacggctgagctgaaacgcggtaagagccaactcgatcacctgaaggaagagatgattgcggctcaagcagaacgcgactacttgaggctctgtgttgaagaaagcgcgggcggaagttcagtgtcgccggaggagcgggaatccaagtccaatgttctgaaggaccagttgcgaaccatctgcgagttgcaagaaaaacttcgagcgactgagcgagagcgtgacaatgctatgatgagctttcctgggtctgttagtagcggcagcagcggaacccgaccgtcgactgctccagcgtttgccctgccttcactcgcggaggttgatactaaggtgggtaacgagctgcttgaacgagcagaaaaggagatcgaaagggaaactgcacttctcaacaagttgaaaggaggagaaagcggtgatgatgctggtggtgacagcgacggtagtggagccgatggggatggctcggcagacggcatggaagttgaggaagaaaaccaagaggaggccgatcgtatgcgtgtgttccagcgtcgtcaacgccaccttggcgagtcggtccaggatctcgcccatgacatttccctgaaggagcagcttgtgcagaatatccgccaggcccaggaaaactacgatcgaatgaagagcttttatgagcagaagatggcagaaatggtggaggaggtccgcgcagcccaggtggatcgtgatcgccttgttgatgagatccagcagatcgaaaagaaggctgctgctgaaggtgacacgtctggtggaaatggaaggctagcgaagctatcacgagacctgaaggtgaaagaggaagagcttcaggccctgcgcaaaaagcaaaacgatatcaatcgcttcatgaaccagaagaaaaagaacgagacccagctacgcgtactgaactcggagatcagcaacatgaagcgccaaaaggtggatctggtgaagaaaatgaacgaggagagaaagcgatacgaagaagaagctaaacagcgtcgccgtgaaatcatgagcctcaagcgcagccagcagcgggacaagcagcaaattcaacgcttggggtcgcagaaggatgcccaagagcgggtgctgaagcgcaaaatcgaagaggcatcagccgtgaagcagcgcctcaaacgccaggaacaactgacggcccaagctagaaaacaaaatgctacgtatggtcgtaagaaaactgctggggcgaatcgtgctgatcgtgatgcgaagtggttgtccgaggaggtgaagaagcgtgcagaggaacagcagaagctggagcagttgcagaaagaaagagaggctgtggcgaaggagatggaggcgctgtatgcgcagcgtgacaagcttgaaaaggaggttaagagttctatttcgtctcagacgaacattcgcgacgtgctcacgtcgcctatgcaaaactcgccgcttagccgacgcaatagcggacgccaggagcagcagctgacgcctgcggaggagcaattgctctatgacttggaggaacgtatcgaggcctgccaagcgcaactggagtacaaggaagagaaaatttctgagatttcagacgatgtacgggttgtggatggaggcaacgcgttggccaaaatcgagacgacgcagtcactgcctgaggcacgaactctcttgaaaatgctcttcggaatggcggttgacgtgaagaagcaagaccagcgtaaggagcaagagctgaccaagcagcaggtggaaatggcagagcttacccgccatcttgagcaggaacgagagaagactttgcagattaagcagagttacgaagagtccctgcaacgcgtggtgaacggtgggatgaatgacgatgagtcttcaccagcgcaggagccactagacgaacgcagccgcatcctgttatctgtctccgaagagagaaactccgtgctgagaaagaaatgcgaagagctggaaactatctcgcggacgatcgatcaggaaaagcagtcagttgaagctaggctgcagcaggaacaggaggatcttgctgcgagccgagagcgcgttcggtatttagaaacaaaactgaaaaagttgagcaaggtggctgtaggagctagccagactccacgccgttcacgcattcctgtttcggggccgagcaagctcagtgcaccatcgcagcaggcacaatcaggaccggcttcctgggctaacgagtttgacgacgatgaagatatgggcaccgacgacaacgacgctgaccaggacggcagcgaagatgttcctatgcgcagtgacgaggatgaaaatgctcagtcttctcgttcattcgggcaagaccggcgccggtttagaatggagttggagagtgtgggtggtagcacggaattttcgtcggtgtcatcgcaaaagggtcgcatttcgcagcgccgttccggaaatgaagagagcgagggccatggagacgatgggggcgacgacgcgaccaaggaagactcaccgcacatgggcagcgacgattcttcgtctgccaccaactccatcttctcgcgtttgtcaaaccctacgaacttcacgggtattcacaagaaccgcgtgcgggaaagtgcctcaaagcgcgagattctgcagagccgctcggagcgtaatcgctcgaggcgcttgaaagacaagggccagctcaagcgatctgcaaacacgccgacggagcagtatgttggaactcctgggggcttcaagaacccgccgtcgttgaagagcaattcggttctggaggtgcttgccaacatgaaacgagagaacgagtccgagcagtacgtcagctcgtctggattgcgacagccgatgtccttcgtgacgacagaccgtccgcgtgactacagtagtgacgacactgaacttgttggagcttccagtacgatgccccctccagctccacagactgatgtctactctcgccttgcaggccagtacacggcctctgccaagagcaagcgccagcacgcaacgactcctgctcgtcgcgacaaggcggatgacgtggaaggcgcagtcaaggctgggctgcaggggatcgagctggaagacgacgcctatctcatagaccatcacggaagcgaggatgccaactacaccggcagcgaggacgactccaactacgacccactcctcggtggcgagagcctaatcaagcaggtccacgacgattaccgggagcgccttgcgcagcgaaatgccgatgctggaagctaagcatcattcatagcgatggggcatgccccgccaacttggtgctcctcacccatgacaagtgaggacgcactgtttccatgcggcccgcatgcgaactcaaccgcaggcgcagcgctcacgcaacgcgttttagatgaacagacaagagaaccatcccgtcaagtagggtgcaacagcaacacgggcaaccaataaaaaagtgatcgatgctcatggaacatgcaaaataaggtactacgaacgtccgtccaactcatatgcagcacgcaaatccagacagcgaaggagcatcgcagtaagcgagcgagaagctcacgcagcgtccagaatctcttgcttaagggagagatactgctggtacgtgagcttgtggatcgagctgcggtagcgcgtgaccttgacggtcttgagcatgtcctgcgtgacgctgcggcggtagcccgccttcctcatgagagacgtgacggtctccgtgtgcgtccagccctgctcacgagccacttgcggcaggtacgtggcgctgtactcgttgccgcgcgagtcgctgaagtcgatgatgatcccgtgcgtgccgatctggtcccagtacgtaaccagttagggaaagctttaagaagacagagctaaaagctagagtccaccgacctcccagtcgtcgaagctctcggcgtcctggtagtcgatgagcagcgacacggagcagtgcaggcggtgcagctcctgcggcccgatggggtcgaagcggcggtcgcgcagcgcgctcttgaacgtgaagtcgcgcaggttgcgcagccgcgtgggcgccagcgtgccgatgcagccgcgcaggtgggtgccgccctgctcctcgatctcccacgtcacgaacagcgggctggcccggggtggacagccacaccaaaaccaaagtacgcacgcacccacacgacaccttattagcgacatgttttgctgggactccgtcttattatagagctgacaagaagacagagaacgatacgcactattcctgcagcacgtcgaagcggggcgtgggctcagcgccgccgtcgaagtgcgactgcagcgtgtcgaagcagtacacgaccatcgcggcgctcgccatgttcgcggcgcttggatctaatgaagaggaagaaagatgcaaaaataatttaaaccaatgagaaggggtcgaaaacactatccgaacttagcaatcgagtcagccacaataagttcgcaccctgacacccgtttttgttggtcgtaagcgaattttccatctcagctggccacaggatgtggaggtatctgcactagcgctgcgttggtgtcggcggcatttaggcccgcaaatgcatgttgtacgaagtgtcttgcgaccgacggcttccagcgtcgtggccccgctcactgcagctttcatcggcgccaaaagaatcgcgttctttcgcgagtttttttttgtgcagatcgatcaacgatcttgcgttgagtttacgggcagcagctggccggccgtcgttgactcactcaaggttctctgtcggctcccgcaggcaaagcccgcatggcgatctcgtgcatccgccgaggtacggatgcataagaagaagaccgcgcgagatgtgggctcctctggcatgggcctgggcgaggcgagctgcccttgcccgtgagtcagaccctacactccacgacaaaaagatatggacaccaccaaaagtggctgtaacttcgtcattttttatcgttttaaggtgcggtttggactagagttgcagccgatggggtttgtcgccccatacaaagtccaagttgtatcatttgtaaggggttttggttaatataggattttgtatggggattagctgtccataagttttgtcacctgggcagaaccagtgtttgtatgtgagctacctgaagaagcgcaaaagcgcgcgtgttagcagcgtgcagatctttatcagcgtgttctgcaactctagtccaaaccgcaccttaaaacgataaaaaatgacgaagttacagccacttttggtggtgtccatctctttttgtcgtgcgtggagtgttggcgccgacacccagcagctgggggcccggcaggaaagacgttcaccggctccgcttcctgccgccttgacacggccgccgcgttacgatcaccaggagcagctgggggctcaattcaatcacggcccgcggaatactggcaccgtatcgccttcatagatgtgcaggacacctgggcgggtgggtgagtcacgtcggcgtcggcgcatgacgaggacgcgaccgacgctgggtgcttgctcgggacaccccgctgcttgtacgatgatgtttgcacaaatgagtgggggattttactgcatttacatgaggcgcggcccctaagctagccttgcctgaccttataactatcggttgggaatgaacaggtgctgcccctaatctgtccgtgctccgtggcgaatgcacacgcctcgacgaacggcgcccttgttgcagccggcttcccggcagcgccggccgccgccgtgcgagacgcacaggtggccgcccaccgcgctcttggtgcacccgacgacttcgcatctccggccgccgccgtgtgcgatgcagagaccgcccttgagcgccgtcttggagcagttgggcgcgctgcagcgcttgccgccgccgtgcgcggagcagagcccgccggccagagcggacttggagcagccttcctcgcgacagcgcttgccacccccgtgggcgatgcagtagccgccctccttggcgctcttgacgcagccctcgttgcggcaccgccggccgccgccgtgcgagatgcagaagccgcccgtcttggcgcacttgcggcactcgggcactttgcagaggcgactgggcttgtggaactcgcagaaggcgccgaagaggctgttggccgtgcggtagcagttcttcttggagcagatgacgccacccgcgggcgtggggaggcccagcgcgttgggcacgggctggtactgctgcggaggctgcatctgcactggcatgtgcatcggctcctgcggcgtgtccgggttcgtgatgaagctcaggctcatgcgctcgcgcagcacgggcgtggagaccgtggaggcctcgctgggcgtggtggacgcgacgctcgtggtgtccgactcgggcgtcgggaagctcagcgcgagcttcttgggctcgaaggccggcgggtggcacagctcgagcgggaactgcgggcggtggtgcatgaccccgcgcagcagcgagtccgtgagctggaacatgctttcagtatttcgagtccgagttaacgcggtgtggtgcagtacagtgcggatacgcctgtggccgagacttggcgagttcgattgtggtgtgacggagaccgccgccgcgagaataccaaatcaggggcagaagatggacggagccattgttcagatcctaagcaagcgcgcgagcgaggttgcggcagatgtctcccggccatgcggcgatcacggtcaaggctcgactcacgagcgcggatgcgtgaccgccaaagactgcgccgtggcccgtctgagcggccggatgcccaggctgctaccaatgagttttcgtacctcacgacctcaatactgcagtattctcaaactttaacgaggcattattgtgtatggaaacaccatgaggcacgcacacttatatagactaatgtaagggatgagggcgtctcaggctgcctctccaataatttcttgcagacagtgtccctcagtgctgcgctgcgccaccttcgatcgcgtagttgctaaagcgaccgtaacggggaccctttgcgcttcaagctgcaagatgtccttgggccgcgtacctgacgaaatactggtcctactgcgaacgcaatcagaaactcgaatctaccgctgtcactactgtagctttctccatgcgtcttcgagcgtcaggttcgactgaccaccagcatgttcctggatgtcattcgtgtggttgctgttataatagctgctatcctactcctcaattgtagctctattagagaacgtaggtctagctctcgctcgtgtcgaagataatattgctctgtagtcaactttggtctgtccggagcctaaagcaacgctacagcgatgcctcgctgctcaagtcgcggtgggcgtgaaagcggtagcaaccagagctggcttcgagttttagtggcatttgccacggcctttggtggtactgaaatctcgcgttggggttttcatagggatgtagcgacagtggtggatttatgatgcgccgttgctttcaggggagttgtctatactactttctcaaacgaacattgctacaggtaagaagtcttgcacttttaacaaacagcgtatcaggatggtatacgtacgtacaaatgtaccatgtaatggtgtcaatatgtagccgatttgggggatgactagtgcgtgtattccacacttagactctcaattatcttctgtattgatgtctactcaactgcgatggctgtcaactttgttatgagcactgttggtggagcaaggagccacacactcttgggttcagcctgaatttcttccgtgaaatgaggcgctctcagcaatctttaatgaggtatttcgatctttttatgtaataacgcctcattggtagcagcctaccggcttgcaagcttcgctgactggccaggcggaggagcgagcacatgggcgctttgcagcaggatgtaagcagcatgacggccaaaagctggcgctcaagaggctgtcgtgccagcttgcgcgcgccacttggcggcatcgagcatctttcgtgcagcatgtacctgtacaaattttcttagcccgactgagactctatctaacttgcctggaaagccccgctcgaaagaggacttgaacttgccgcgtgctgcttgattcccgcccgcttggaggcggactcgcaggcctgccttctttgcggccggggatttgtatatcatgcggtacccgatgcaggtgccccccacgaaggaaggcggcgacgagtgctctatggcaggcaggcagcgctcggtcatagtgagcaccatgttattacagtatgtgtactatccgaagtccagtcctggcgtgctggtgcttttagtgttgcggccgcaaggtcggcggtctcacacccaccaagtctccgtgttgatcggcgacttgacttgagaccgactcggcgggggcgaaaaagaatcgttgactcaatgcaaaacagctgcgggctccctacgcgaacgttacgacgtgacttacatgtacgttgtcgggtcgagcatgcatgaggcgccgctgagtccacagcgcctgccaccgccaccactcgaggagaaaatcgccagagccggtcgggcacgcgcgagagtatccggacccacgagcggacaatgcgcgcggagctgctcgtcgatgccgccgccgccgcgtggatttgtctgcacgcgctgaggcaggcaacgagcgcggcagtcacgaaccacttgatggtggacggcgggcgggtctggtcctggtcccagcggtgccactgcttgcaagtgcgtagtggccgtcggcgttcggccactggccgaacgccggccatgacacccaactgacataactcgacgttagtcggtgaaggcgctacatactgcccacgaagtccattggaaaggcaggcagccagagctcaccagcaagagccacagtcactctcacggtgtttgtatctctctctcttttcaaaggatggcaagcctggcaacctttactcccacgagcggacaccaccagctgcaagcccgggtacagtactgtacgctacgtcacaattgagcttcagctggtcaacatactgaaagcaagacgatgtcgacctcgccacgtcgcgctcgctcgcaccgcatgatcacgagaaaatgcggccgccgattatcatcaaggcgcggcgtcgtgtgggggcctcgaaagcactgtacgcggctcggctcggtgaatggcttcacggcggcgcgtgcaaggataacatcacgatgcagcaatgctgccagcatcatcgatgctgtacatgtgtacctcgtgaaggccatggcggtgttggtggagcaccgcactggccaatggacaattgtggacgatatggatcggacccctttcattttacagcgcgagcatatttgcggtaaaccgtaaccgataaaaggggggggggctgcatatagcaaggatacttgtgggccacgagcttcctgaaagcatggtgcacgagcagatccaccaccgccgcaggatattggtttaccaccgaggacagtatccatgatgaggctcttcaacgtgagcctgcagtgtatcgctacgactaggtgcacatcggcgacaacacgcgcgaattcatacgtacatccagtgcatgtcatgcactttgttgagcggatccagcgctgccgcgatcttgctttcggtgtggacgaacggcggacagcagccggcgactcccaagcaagagccgcagaattcggcattgtgcggctctcgtgagtcgctaggagtcccatggcctttcaaaagatcggcgaggacaaaggtgctcgccgctgccagacagtcgagaattggtctgcaagaacttgcccctgggtttgcatcttactacagtgcagcgcgcggtcatgacgttggtctcctacgggagcgaaaaccccgactgcgtcaaggtcgagcagcccgatgcagcgctgtcttctgctcactccactaccaaaagatggaggaagctggcgctgatcacagcaggaacagccctttgcgtcggcagcgccctcgccacgtaccaaggctggagctcctacctcaccgacgcaacagttgctgcgaaccgagcttctgcgccgagcgggatgttcctggagagccaatacacgtcggaagtcaaacccgacgtgacgctgcttacctcgggccaggagatcatgctccgcgtgcgcgggaagaacaacctgtgcgtcgacgacggaggcggctggacggccgcgtcgtccaagttcaccaacaagccatgcaacccgaacagccccaaccaggtcttcaagtacatctccacctcaaagcagttcgccagtgtctacaagaccgggctgtgcatcgacgatggcgggtcgaccacggcttcgggatcaaaggcacagctgaacaagtgcgacgccaatagtcagaaccagtggttcgtcatgaacaccaagacgctgatgctaaaaaacccagccaagaacaatttgtgcttcgacgacggtggcggcgccacgactgggtccaccaagtacgtgctgtggacctgtgacaataacaatcccaaccagcacttcgaggtgctgtcccgtgctgctatggcggccgagaagaagcagaaggcggggacgaccatgtacgatctcatggtctccggccaggagatcatgcttcgcgtccgtggcaagaccaacctgtgtgtcgacgatggagggagcttcaccgcatccacgaccaagttcacggacatgccatgcaacccgaacagcgtgaaccaggtattcaagtacaatatcaagacgggcggcctcgagagcatcaacaagccaggtctgtgcattgacgacggtggagcgttgagtgcgggtgcagcgacgtcgcgtctgtggtactgcgatatcaacaaccagaaccagtggttcgacatggatgaatccacactcatgatgaagaacccggtgaaggacaacttgtgccttgacgacggaggaggcacgagagctggagcaaccaaggtcaccatggggtcctgcgacaacaacagtccgaaccagcacttcgaagtgctctcacgtgctgcgttgcttgaggagaagaagaagacggggtccactccgtacgatctgctcttgtccggccaggaggtcatgttccgtgttcgtggtaagagcaacctctgcgttgacgatggcggcgggtggagtgctgcggtgtcgacctttgtggacaaaccgtgcaaccccaacagccccaaccaggtcttcaagtacaacatcaggacgcttgagttcgagaacgttaacaaacctggactgtgtatcgacgatggcggctcattgagtagtgctgggtctactgctcgtctcgggtactgcgacgccaacaaccagaaccaatggtacgtactggacgagtcgacgctgatgctgcggaacccgatgaaggacaatctatgcttcgacgacggaggcggaacagcagcaggagcttcaaagtttgccacgagaacttgcgacaacaatagtccgaaccagcacttcgagatcctttcgcacgtcgcaatgatcgaagagaagaagaagagcgtcggaacaactgcgtacgacgtgctgacgtccggccaagaggtcatgcttcgtgttcgtgggaaggccaacctatgcatggacgacggaggcggctggagtgctggcgcgacgaacttcatcggccagctctgcgatccggacagccccaaccagattttcaagtacaatctccagacgcgcgagttcgagaacgtcaacaagccagggctctgtattgacgacggtggttcttggaaggctggtgggtcgcaggcacatctgtggtactgtgatccgaacaatcagaaccagtggttagtccttgatgaggatacgttgatgctgcacaaccctacgaagcccgacttgtgcctcgacgacggaggaggagcattccctggcgacacgaattttgtactgtcaaattgcggtgaagacaacccgaaccagcacttcgagatcatttcgcgtacagattttgtcgaagcacggagacagaagagaatcgaggcaggaatcgacgacgacgtcgaacttctcaactccggagggaaaattatgcttcgagttcatggcaagaacaatttgtgtgtcgacgacggaggcggtcgctcgaacggtgcaacgaagttcgtggaccgcgcgtgcaatccgagcagtccgaaccaagtgttcacatacgacgccaagactcgccagttcaagagcgtgaacaagccgggattgtgcctggacgacggcggtagctcgagttcgggctcggctcaagcgcaattgtgggagtgcgacgcaaacaaccagaaccagtggtttgtacttgacgaggaaaccatgatgctgcgtaatccagcgaagaagaatttgtgtcttgacgacggtggaggcacggccccgggcgccacgaagttctggctgtggacgtgcgaccccaacaacgtgaaccagcacttcgaggtcctttcgtacgagaaaatggccgaggagcagaagcagcggctgatcgctgctggacgtaacagcgacgtcgagattctgaactcgggagagtcgatcatgcttcgagtccgtggcaaagaaaatctgtgcgttgacgacggaggcgggcgctccaatggcgctacgaagtttgtggaccaaccctgcaacccgaacagtatgaaccagctattcacgtacgacccgaacacgtaccagttcaaaagcgccaacaagccagggctgtgcatggacgacgggggaggttggggtgctggccaaacgaccgctcacctgtgggaatgcgacccaacgaaccagaaccagtggtttgttctggatgaggacaccatgacgctgtacagcccggccaaggacaacttgtgcttcgatgacggcggtggcacgacgccaggatcgaccaagtattggctgtggacgtgcgatggcaacaaccccaaccagcgcttcgaaattctctctgctgccgcgctggctgcggagaagaagaaggcgcggattgctgcgggcaacacagcagtcgacatcctcgtgtccggccaagaaattatgcttcgggttcgtggcaagagcgacttgtgtattgacgatggcggcggtcatctgaatggggaaacagacttcgaaaaccaactatgcgacccggacagccccaaccagatcttcacttacaacccgatgacgcaccaattccaaagcgccaataaaccgggtatgtgtattgacgacggtggtggctggagctctgcagagacagcggttcacttgtgggagtgcgacccgtacaatccgaaccagtggttcgtcatggacgagggcacattggtgatattcaaccccgcaaaagacaacctgtgcttcgatgatggcggtggcatgacaccaggtgagacaaagtatgtgctgtggacctgcgacgacaacaacccgaaccagcactttgaggtgctacctcgagcttcaatgatagcggagaagaggaagcgactcattgctgcgggtgttgacgacgacatcgacctcctcaactcgggtcagcctctgatgcttcgtgtccgtggtaaggacaacctctgtgcggatgacggcggtggccactcgaatggagacaccaacttcgtgaatatgccttgcgacccgaacagccccaaccagatcttcacctacgacgccaagacgcaccaattcaggagtgtgaacaaacccggtttgtgtctggacgacggtggtgggtggagtgcagctcagacgacggcgcatttgtgggattgcgacccgaacaaccaaaaccaatggttcatcctggacgaggacaacatgatgctccgaaaccctgtgaagcccaacttgtgcttcgacgatggcggcggtatgactcctggcactagtaagtactggctgtggacttgcgacacggccaacacgaaccagcactttgaaattgtgtctccagcgttgatgccaccgctggtgctgaaggacgcaagtgctgtttcagatggacaaaccttagacaaccccgatgcccaatacatcaagacaatcgaatctggaattaaggtgctgatccgagcgcaccagaagaagaacctctgcctggacgacggtggaggccgctccaatgccgagaccaaatttgtgtaccaaccgtgtgaccccaacagccccaaccagatcttctcgtacgacgttgacgcgaaggaattccagagtgtgaacaagcctggtctgtgtctagacgacggtggaggctggaatgctggagatagcacggctcacttgtggcagtgcgactcgggcaatgagaaccagtggttcgtgaccgacccagacaccatgttgttccacaacccggcgaaaccaggactttgcttcgatgatactggcgctacggagcccagcaagtcgaacttcattatgtggtactgcaactcagacactcctaaccaacagtttgaagtggtgcctcaatgggagctgctcgggatcacgccggacgttgcgcctcctccacttccgaagattggagacgggctgtggagcactattgataatgggaatgacgttctgccacctcccgctctaagcgacgtcctaccgccggttgtcgtggataataacggtggcgttgtgggacctactccgcccaatgctgaagacggaggcttcgactattctaacgtcgtagtgctacgtaatgatgacaatgttatcacccctcaagtggattcgagtggtttcggatcgactgggggtaaaggtgccatgacaacgaccagcgttagcgacggtggaattgttgctactcctgagccgcaaccatacaacccggctactcctagtctgatcgacggtgacagtgtccaacctacttacaccaatcccgggtggaattatggcggatctactggcaacgctgttgcgatggagccgacagacaaccaaaacccgggattggaatatacccctacgactcaacgcccgatcattgaggacggtggaatcgtcgccatccctccttcgaacgacgcggtagtttccgtgcaatctacagacgcaactactgcaggatggggggacacccacgccgacagctctggtcccgcacaggatatcttctcgggcaccagtaacccagacactgcgtcaaccccagcggttgatagtccgacgaaccccgaccaagtcggcctggtgggcccggcagtgctgccgttccaggaggacaacaacttgccaatccccaatgctcccgttatcaggaaggccgacttgcctctggccaactacggagactgcgactggaacctgctggcgccgtcgaacgacacgctcttgatcatcaacaaggacgactcgccgatcatctcggcggccaagatcttcaagtacttgcagactatcaaggaacacgccgacgtggagcaccaggtgacgatggaccgctacaagcgcaccttccagtgtgcgaccgacggcctgaagacgctggccaaggacgcggtgacgagcgacgagtaccacgtgctggtgcagtggatgtacgaccactgcgcggccggagcgaccggtgtgaagcccgccgagaacccgtccggatccatctcggacgatgtgctcaagggcgacgacgtggccgtgctcgtgaacgacgacaagatcaaccggcagttcatgaccaagctggacttctactacgagatcaagaaccactacgcggacaagaacgcggagctggtgggcaacgcggcggtggccaacttgcggtcgtcggagacgctgaagctggagaagaagctggtggactgcatcgaggaggcctcggagcgcttcggttacaagcaggaccagacgtccaacgaagaccgcgaagaccgcctcaagcaggccatcgcatgggtgcatgacacgtgcatggcttcgtaaactgaatccgacatgaactaactgcaaccgaatgggatcagggacgttcgtaagtgcgagagctcaagttcaaatccaaacaaaacattgctacagaaagcaaatcccgaataagttacgggagttcttacgctatgatctcggtaaatttcgagccgcactaatccgatatgttacgttgtgtttcgaaaatcacgatttgattggctagtttttctataaaaaaatgtaaggccgcttagctcgcatcagcacctttttttttgaaatgaaagatacctatcctcgcgccccttcagatggctttgccgccgttcgatgggctctgctggagaccgtgcaaaccactttcaagtggatccaatctcggatctttgtactcgctcagagcgaccctcgaccgaggccacggtcaccgcacaatgatcacgagcggctcagatggcccgggaagagtctccgatggcaagatcgccatgcccccaagagatgtcggatcttggacacctcggagctcgaaagctctcccagccaagcactgccattctcactcgtgaatttgcctgctagctgtcacacccccttcctccctagtcttctgtccccagtcaagtgtcggtgtgtgtggagtttgcaagtcagcggtcatgtcgttactctcctacgggagcgacccggacgccatcaaggtcgaggtcgatcaacatgatgctgcgttatcaccaaccccggcccggtctcccggcagcaagtggaagaagctggtgctggccacggccggcaccgccctgtgcatcggcagcgccgtggccgcgttccaaggctggagctcgtacctgaccaaggcaaggatcggcgcggagagggcagccgcacccaacggcatgttcctcgagagccaaatcgcgttcgacgtcaagtccgacttcagtctgctcaactcgggccaggagatcatgctccgcgtgcggggcaagaacaacctgtgtatcgatgatggcggtggctgggccccaggcacctccaagttcaccaacaagccgtgcaacccgagcagccccaaccagatcttcaagtacaacgcggccaccaaggagttcgccagcgtctacaagaccggactgtgcatcgacgacggtggctcgtggaacgcggccgggaccaaggctcacctgtggtactgcgacccgaacaaccagaaccagtggttcgtcatggaccccaacaccctgatgctcaagaacccagtcaagaacaacctgtgcttcgacgacggtggcggcgccacggccggctcctccaagtacgttatgtggtactgcgacaacaacaacggcaaccagcacttcgaggttctgtcacgcgctgccgtggcggccgagaagaaggcgaaggtcggaaccaccatgtacgacctcatggtctccggccaggagatcatgttcaaagtgcgtggcaagaacaacctctgtgtcgacgacggcggcagcttcaacgcggccacgaccaagttcgtcgacatgccgtgcaacccgaacagcgtgaaccaagtcttcaagtacagcatcaagacgggcgagttcgagagcgccaacaagcctggactgtgcatcgacgacggcggttcgtggaatgccgccggtactaaagctcacctatggtactgcgacatcaacaaccagaaccagtggttcgacgtggatgaaacgaccatgatgttcaagaacccggtgaaggacaacttgtgtctcgacgacggaggcggcaccaatgccggtgcgacccgatacgtcatgtggtactgcgacaacaacaacggtaaccagcacttcgacgtggtctcgcgtgctgctctgctcgaggagaagaagaagactggccctaccccgtacgatatgctcttgtctggcgaggagatcatgttccgcgttcgtggcaagaacaacctctgcgttgacgatggcggtggctggggcgctgccgtgaccaagttcacggacaagccgtgcaaccctgacagccccaaccaggtctacaagtacaacatcaggacgcttgagttcgagaacgtcaacaagccgggcttgtgtatcgatgacggtggctcgtgggaccccgcgggctctacggcgcacttgtggtactgcgacgccaacaaccagaaccaatggtacgtgctggacgaagcgcagctaatgctgcgcaacccgatgaaggagtacctgtgctttgatgacggaggcggcacaaccgcgggcgccaccaagttcgtcatgtggaagtgtgacatcaacaacggcaaccagcacttcgagatcctctcgcgcgcggccatgctcgaggagaagaagaagaggctcggcctgaccccgtacgacattctcacgtcgggccaagagatcatgcttcgtgtccgtgggaagagcaacctgtgtgtcgatgatggaggcggctacacggctggggccaccaagttttccgaccagccttgcaaccccgacagccccaaccaggtcttcaagtacaacgtcaagacgcgcgagttcgagaacgttaacaagccgggcctatgcatcgacgacggcggttcgtggaacgccgctggaagcactgcgcacttgtggtggtgcgacccgaacaaccagaaccagtggtttgttcttgacgaagagactatgatgttgcacaacccgatgaagcccaacctgtgcttcgacgacggcggtgccacgtccgcgggcgcgaccaagttcgtcatgtggtggtgcgacaacaacaacggcaaccagcactttgatattctgcctagggccgatgtgattgaagcacggaggaagaagaggatcgcagctggtattgatgacgacctggatctgctcaactctggccagaagctcatgctgcgtgttcgtggcaagaacaacctctgtgtcgacgatggtggaggccgctcgaacggtgctaccaagttcaacgaccagccgtgtgacccgaccagccccaaccagattttcacgtacgacgcgaagacgaagcagttcaagagtgccaacaagccaggcctgtgcatggacgacggtggcgcttggaacgcggccggatcgcaggcccacctgtgggattgcgacccgaacaaccagaaccagtggttcgtgctcgacgaagacaccatgatgctgaagaacccggccaagcccaacttgtgcttcgatgacggcggtggcactacggccggcgcgaccaagttcgtcatgtggtactgcgacaacaacaacccgaaccagcactacgagatcctgtcccaggccaagatgatcgatgagcggaagcagagactgatcgctgcaggcctggacgatgagatcgatcttctgacttcgggccagccggtcatgctgcgtgtccgtggcaagaacaacctctgcgtcgacgatggaggaggccgctccaatggtgcgaccaagttcgtggacaagacgtgcaaccccagcagtcccaaccagatcttcacgtacgacgccaacacgcgcctgttccagagtgtcaacaagccaggcctgtgcatggacgacggtggtggctggagcgcggctcaaactactgctcacctgtggcagtgtgacccgaacaaccaaaaccaatggtttgtgtgggatgagaacaccatgatgcttcgcaatccggccaagaacaacctgtgctttgatgacggtggcggcactacgcccggtgcgaccaagtactggctgtggggatgtgacaacaacaacccgaaccagcatttcgaagttttgtctgctgctgccatggccgcggagaagaagaaggccaggatcgctgctggtaacacggcagtcgacattcttgctaccggccaggagatcatgctccgagtgcgtggcaagaacaacctgtgcgttgacgacggtggaggccgctcgaacggccagaccaagtttgtggatcagccgtgcaacccggacagccccaaccagatcttcaagtacgactcgatgactcaccagttcaagagtgtcaacaagcctggcctgtgcatggatgacggtggctcatggaatgctgcgggctctcaggcccacctgtgggactgcgacccgaacaaccagaaccagtggttcaccatggacgaggacaccttgatgcttcgtaaccctgtcaaggacaacctgtgcttcgatgacggtggcggtactacggccggtgctacgaggtatgtgatgtggacctgcgacgagaacaacccgaaccagcactttgaagtgctgccccgagcgatcatgcttgctgagaagaggaagcgcctcatcgcggcgggtgttgacgatgatgtcgacctcctcagctcgggccagccactcatgcttcgtgttcgtggtaaggacaacctttgcgccgatgatggtggtggccactccaacggagagaccaagttcgaggaccagccctgcgacccgaccagtcccaaccagatcttcacgtacgacacggtgacgcaccagttcaagagtgtgaacaaacccggtttgtgtctggacgacggtggtgggtggagtgcagctcagacgacggcgcatttgtgggattgcgacccgaacaaccaaaaccaatggttcatcctggaccaggacaacatgatgctacagaaccctgtgaagcccaacttgtgcttcgatgatggcggtggcacagctcctggggctagtaagtacttgttgtggaattgcgacgcagcgaaccagaaccagcacttcgagatcatcgcgcctgcttcgttgccagtgccagcgaagaaccccgacattgagctcctcaactctggacaaccggtcatgctccgcgttcgtggcaaggtcaacctctgtgccgacgatggtggtggccgctccaatggcgaaaccaagtttgtggatatgccatgtgatcccaacagcccgaaccagatcttcacgtacgaagcgaagacacgcctgttcaagagcgttaacaagcctggtctgtgtatggacgacggtggtggctggagtgcggcccagactacggcccacctgtggagctgcgacccgaacaaccagaaccagtggttcacgttggacaagaacaacatgctccgcaacccggccaagccgaacctgtgtttcgacgatggtggtggcatgacccccggtgctagcaagtactggttgtggacttgcgacaacgccaaccagaaccagcacttcgagatcgtttccccttcgtcgatgccagcgctcaaggttgacagcaatgaccttctcacctcgggccagccgctgatgcttcgcgtccgtggcaaggacaacctgtgtgctgacgatggtggtggccgctccaacggtgaaaccaagtttgttgatatgccttgcgacccgaccagtccgaaccagatctttacctacgacgcgaagacgcgcttgtttaagagcgtcaacaagccaggcttgtgcatggatgacggtggtggctggagtgcggcccagacgacggcccacctgtggagctgcgacccgaacaaccagaaccagtggttcacgttgaacaagaacaacatgctccgcaacccggccaagccgaacttgtgcttcgatgacggtggtggcatgactcctggtgcgagcaagtactggttgtggaactgtgacaacgccaaccagaaccagcacttcgagatcatctctcctgcttcgttaccggcgcctgtgaaggcggacagcgatctccttacctcaggtcagccgctgatgcttcgcgtccgtggcaaggacaacctgtgtgccgacgatggtggtggccgctccaatggtgcaaccaagttcgttgatatgccttgcgatcccaacagcccgaaccagatcttcacgtacgacccgaagaccctcctgttccagagtgtcaacaagccaggcctgtgcatggacgacggtggtggttggagcgcagctgagactacagctcacttgtggagttgtgacccgaacaaccagaaccagtggttcacgttggacaagaacaacatgctccgcaacccggccaagccgaacttgtgcttcgatgacggtggcggtatgacccccggtgcgagtaagtactggttgtggacttgcgacaacgccaaccagaaccagcacttcgagatcatctctcctgcttcactgccggcagtgcagccggccaccggcagtgaccttctcacctcgggccagccgctgatgcttcgcgtccgtggcaaggacaacctgtgtgccgacgatggtggtggccgctccaatggtgcaacgaagtttgtggatatgccgtgtgacccgaacagcccgaatcaagtcttcacgtacgacgcaaggacgctcctgttccagagcgtcaacaagccaggcctgtgcatggacgacggtggtggttggagcgcagcgcagacgacggctcacttgtggagttgcgacccgaacaaccagaaccagtggttcacgttggacaagaacaacatgctccgcaacccggccaagccgaacttgtgcttcgatgacggtggcggtatgacccccggtgcgagtaagtactggttgtggacttgcgacaacgccaaccagaaccagcacttcgagatcatctctcctgcttcactgccggcagtgcagccggccaccggcagtgaccttctcacctcgggccagccgctgatgcttcgcgtccgtggcaaggacaacctgtgtgccgacgatggtggtggccgctccaatggtgcaacgaagtttgtggatatgccgtgtgacccgaacagcccgaatcaagtcttcacgtacgacgcaaggacgctcctgttccagagcgtcaacaagcctggcctgtgcatggacgacggtggtggctggaacgcagctgagactacagctcacttgtggagctgcgacccgaacaaccagaaccagtggttcacgttggacaagaacaacatgctccgcaacccggccaagccgaacttgtgcttcgatgacggtggcggtatgacccccggtgcgagtaagtactggttgtggacctgcgacaacgccaaccagaaccagcacttcgagatcatctctcatgcttcgttgcagggaaccggtccagtccccgctcctcctacgcccggcgctgactacatgcagatgatcgagtctggcatcaaggttttgattcgggctcgcagcaagaacaacctgtgtctggatgacggtggcggccactcgaatggcgagaccaagttcgtgtaccagccgtgtgaccccaacagcccgaaccagatcttctcgtacgacgtcaacatgcgtgaattccggagtgtcaacaagccgggtctgtgtctcgacgacggtggtggctggaacgctggcgatagcacggctcacttgtgggagtgcgaccccggtaacatgaaccagtggttcgtgaccgacgcggacaccatgctgttccacaacccggcgaaaccaggcttgtgctttgacgacatgggctccatgaacccgggccagtcgaacttcgtcatgtggtactgcgccgcggacagcccgaaccagcagttcgaagtggtgcctcagtgggagctgctcgggacggtgcctgacgttggcccgcctcctcttccggtgattgacgatggcccgtggactaccattgacaacggtgatgatattctgccgccgccccccatcgatgatgttctaccgccggttgtcgtggatgacaacggattggttgtggatcccttggtgcctgccaccggtgatgatgacttgctgcctcccgacatcgctcagcctctcggccctgacgccaacggtgtagtcgtggagcccgtgcggcatggcactggtggtgatcagttgccgcctcctgacctccttcagcctgtcggcccggacaacaacggcccagttttggagcccttgctgccaggcactggtggcaatggaggctttgtggagccgacacctcctgacatgactggcccgatctacaacccgccggttcctggtggggatggcagtggcttgatacaacctacggacaacacgggaggctgggaggacacccttgctcaagacatcgacaccaccgacaccaccggccaagatatcgcgaccaatccgacagcgccagacgtcttgccggcgaaccctgaccaagtcggcccggtgggcccggcagtgctgccgttccaggaggacaacaacttgccaatccccaatgctcccgttatcaggaaggccgacctgccgctggccgactacggagaccgcgactggaacctgctggcgccgtcgaacgacacgctcttgatcatcaacaaggacgactcgccgatcatctcggcggccaagatcttcaagtacttgcagactatcaaggaacacgccgacgtggagcaccaggtgacgatggaccgctacaagcgcaccttccagtgtgcgaccgacggcctgaagacgctggccaaggacgcggtgacgagcgacgagtaccacgtgctggtgcagtggatgtacgaccactgcgcggccggagcgaccggtgtgaagcccgccgagaacccgtccggatccatctcggacgatgtgctcaagggcgacgacgtggccgtgctcgtgaacgacgacaagatcaaccggcagttcatgaccaagctggacttctactacgagatcaagaaccactacgcggacaagaacgcggagctggtgggcaacgcggcggtggccaacttgcggtcgtcggagacgctgaaactggagaagaagctggtggactgcatcgaggaggcctcggagcgcttcggttacaagcaggaccagacgtccaacgaagaccccgaagaccgcctcaagcaggccatcgcatgggtgcatgacacgtgcatggcttcgtaaagctgatggcacgttcaagtgagcgcaagtggcgatgaagatgcatgttatgaatgcatgccctaggcatgtagcagaatcgatgtggatggccccaaaggggctttggtaggcgtagttgagagtagttttcatttgcacatcctgttttcacacactaatttgcctacaaataccacgtaattgcatagttaaccttgtttttcttgccttactcgtccgtttcaatcaatcacttgaaggcttcaagagctcaaaccatttgcaacatgctgcggctgcagtgtttgcttaacacggcgagccctgaagatgaagctctctctgtgcgtgttctaactgtcgcggcctctctagatgatcgcattggcgaactggaggcccgaatcgctgcggaggtggaggtcatggcgatccaagcaaagccctacaccaccatgaagctctattgccttcgacaccagtggctgacgtaccgccaagactcgacgaccaagactgaagtgctgttcctcgacggtgagcctatcgctgggctcgatacttgcaccttgcaaagtgcccagcagcttgtgccatgggcgcatgtgtcgtggtatttcaaagacaagcagttcgccttcccggacacggttgatattgtagtggcatgggaagatgccgaccaggacgaagaccaaggcaccgcgtaaagcaccttcgtcttttaaccaacaaatatactgagctttgccgccgatgcaaggctcaaatcatgccgctgatgcagcaaagcgatatcttttgtacagtcgcgactggtagtcgacatcctgcaatgtggaccgcacgatccaaatctcccaagtacatgtgcggctctcaatggccggggacggccacctcgaggaagatcgcgctggatgaccagctaacttagctgaatggactccgatgtctctcgcagttgcagatttccctgctcacctgcacgccaacaaagtccgtgaatccaagtgtccagcagtgttcttgagtcctccatgccggccagctacgggagtgacaacagctacgggagtgacaaccccgactgcgtgagggtcgatcacctcggtgatgtcggccgtgctcgctcgtcttcgagtgccaagtggaagaaggcggccctggtgactgccggggccgcgatgtgtatcggtgcagctcttgtcgtgtacgagggctggaatgctccgcttagtgcaaccgtgacgggaagtgcgtctccaatcaccaagatgaacctggagagagtggctgtgtctaccgaccagaccaacctcatgtcgggccaaccggttctgcttcgcgtccagcgctcgccaaacctctgtgcggacgacgggggaggcactaaggcggacgagacgctcttcaccggccaaccatgcaacccgagcaatccgaaccagctcttcatctacgacagcgctacctaccggttcaagagcgcgaagaaaccaaatttgtgcattgacaccgggggtggcggtattatgatgacgtcgctgcggctgtccaagtgtgataagaagagcgcagatcaacgctttacctacaaccccaacgcgctcacgctctcgatggtctcgtacccttctgtctgcattaccgattaccaccacacagacggaacatcccgttatacaacctggatatgtgaatcccagatctacggcaacgtgtaccagagcttcgaggtggtgtctcaggctacccttgcagcggagcaaagacgattctggatgctgtcgctggtggggccaagttcctcctgcacatcgctggaactgacaaccagtgtgtctctggatttccatcaagggtctctctgtcaaactgtcaaatgcaaagcaagtaccagctctactatgatgcatcaatcaatcgaatccggcatggttgtgcttggatgacggcgggggcaagaaggcgggaaagaccgactttcgtctggcggaatgctcgacgagtagtatcgatcagacgttcaccttgatgtttaagcagctcaacaaggctaaattgtgcctggacgacggcagcgacggtaccgacaccacgccaaaactgaccttaaaagcgtgcgatctgtacagcaacagccaacactttgagtatgtgctccaaaacgatccggtcactcctgccaccgcttcgacatcgataccatcgacgacgacaatagcatcaacccctgctcctgcgactgccactcctgtgactgcttcggtgatggacacctcagtgacgacgacatctgcccccgtggctgcgagtactactacgacgagctcgacccaggtctctgctgctttgaccacccagcaaaccggcgtgaccactgcttacgaaacaccagtagacgcatcaagtactgcaacacagtcagcaacggagactgcgtaccagcaggagcccaccactgcgccgcaacaaagtcaatactcaaccgtctccgctgtcgaacctgatacaacaacgactgtaaattctcaaacgacggcaacgacaaccgacgtgatgatgccgcagcagagccaaacaactttgcacaccggcgacatggagccgaacatggccgcatcgaagcagagcgatatgacgtctacctccaccacgtccatgatggagcccggcataaaggggaacgacataacctcgaccaggccagggatggatcatgacatgatcacatcgaatgatgtgataaagaccgaaactacgcctgactagcggatatggtggacattgcggcaaaggaccttggcaactcgatgccggcgacttctgcgattacaaacatggacgctttcgccgccaatttcgtgggcaaggactggaacttgctggcgccatccgacagcaccctcgctcgcgttgacaaggataacgcccccgttgtcccagtcgcgaacattttccagtacctacagagcctgaaggaccgcgctgacctagagcacgaggtgatgatgtatcgctacaagcgaacgttcgagtgcgcgactgaggggttgaaagcgctggccgaggactcggtaaccacggacgagtacaaggtgctggttcgttggatgtacgaccactgcgctgccggaaacaccaagattgagatgcccaaggaccttcccatcaccgatatcgacactccgtgggacagcgacgcgaagacggacgtgaagcgtcagttcatgacgaagctcgacttctactacgagatcaagagctacttcgccgagaggagcgagaaactcaacggcgaggtggcagctatccgcttgcgctcggaagaaaccaaagagctcgaggagaagatgatcgactgcatcgacgatgcctcggagcgcttcggcttccaagtgaactcgaacgcttacgcaacgacgaagcacctcaaggctgctattgcgtgggtcgaggactcgtgcatgaaggcttaaggatcacggcgatgattgctggtgctttccgtttccatcctttacttcgtgtagctgttgccttcaagccagccagatatcatccagaatcatcacttggcaagtttgcatgatcttttttccttgattgaaagcgcttcatttcatcattcttgtcttgatacgtactgatcgctatactgagtcccccgaaggcccccgcgggaaaagcgggttgtattgggtctgctgctgctggccagggtactgatagtagctatacgctggctgttgccgttgctgttgctgctgctgattgaagacgcttccgtacggagggggtggtgctgttgccgtagcgtttccgaacgaaggaggctgcgatgcaccctgcgtctgctggtactgcgcgaatgggtgctgttgctgctgttgaggttgcagttgcgcgtagtcgtatgaaggaggtgcagactgttgctgtgtggactggtagtactgcggagtgctgccagcgagctgacgcgctagtgcttcgtcgctcgcgttcggtccagcagcagcagcgttgcgaatttgcatgtcgttcatcattttctgcgccaaagctgcgtcttcagcctcacgttgccgcatttcttcgtcagcagtcagattcagctccagctcgcgcttctccagttcacgggcagagcaatggtctgcaacagtttgatgcaattgctcgatccgagcgccgagctccccgtaaaactttgcaccttctttcacgtgcgactcaagctgctcgaaaacatccacagcgtcgctcagatgctggagaaaagtctggcgttcgtgcagcacgtgatcggtctctttcttcgcctcgaagcgactgttcgcttcaaccaagtcactaagcagcgcctgctcttcatcacaaattgtggcgatcttcccttcaaagtggtcgcggaagaactggttttctgtttcaagtgcagcgtctgtggacacactgttggttctgttcccactcagcagcacaggcagcgcgttgaacttgtcataggagccccggaaatcacgcagcacctggtccttctcctccacgagttggccaagtcgcagcaacagcgatgacacctgtgctatctcttccttgcagctggagttatcttgctgcaactcgggcagctcctggtccagactcgtcttgggccgcgatagcgcctccagcttctcgtggttatcagcaagcttgtcccgtactatgttgtcagacgtcttggcttccttcaccaaacggtagtagcgatcaatgtcggctcgaaagttctgattcagcgaggacgacaccggccgcgcccacttcctttcaccgtagttctggcggcagacattgtcttcaacttcctcctgactcaaccgcgattcaatagtgtgcaacttcttctcggcatcgtccgacaacctttgattttcttgaagctgttgctggatgaaggctccgactgggttctctcttgatcctcccgggcccatagccgcggacgccgtagtgactttcacatgctgaatgcgctgccaaatcgtccgtgggatgccgttgtcgctggtcttctcaaaagcttcgatagacgctggcagacccatggcgtggagcttctccttggcagcttcgttgctcttggacactttctcaactgtctgctccaatatcgtattaatctcctgcttcacgctgtccgcacggtgtagcagatcgttgggcacaaactgttcgaacagatccacgccgcccagttcctgctgcagctcctccgctgtgaagcccaacggcttgaccatcgcagccttccccaccgcgggcagctccgaaaatttgggcacgttctccagatacacactggcgttgtctttcctcgccgcgtcaaggtgctcacgcaccacgcgctgcaccgcctgggcagactgcaacagcgacgccggcagcttgttctgcgtcgccaccttgcacgcctcgtcgcactcggcatcggccgccacgagcctcgtgatctcctcgccgtacccttctcctctctccagcgccgcggccttggacgccgtcccctgccagtactgcgtggctgcgcgcatacagtgcacttggaactgcagatgcacgccccaggacctgtcaatcgagccggccagcgccgacgagcggcaaaagtccagcgccgagacgtagaagtccagcgcctggtgcaccagcttggccttgatggcgtccttcatctggtccttgatggccttctcgtagaagcaggcctgggcctgggccagcatcaggaaggtcagcagccccagcccctccgcgctcatgtcgggcgtcctggcgcccagcgtgcgctccacgagcttgtccttgacctccgtgaaggcgcccgccgcgcgcatgaagtggcggcaggccgtcttgagcccgtcggccgtgctgcggtccgtctgcacgcccagttggctctccagcgcccccacgttgaacatgacggccgccttctcgaacgagactccggtctgcgtgctcttcttgcgcgggcagaacgagtcgttccacgtgaactgcagcagcagcggcgcgcgcgcggcgccggcgtcgctgttgccgtcgcacgggaagcgctgcgccatcttgtccagctgcgcgtagtagcgcagcagcacgtggcgcgagatggccgacggcgtgcgcaccaggtccacgtccgtcttgagctgcgcgaactggtccagcgccgcgtccgccgcctcgctgcccgcgtactcgcgccgcaggaacgcgcccagcgagctgcgcagcgaggcgccggacgtgtcgctcaccttgaagccgatgcccagcattgcgctgctcgagtggatggatttctgattgtgaagaaaaatgtatgggaccaaagatgtggatacacaaacattcttgttttaactgcgttttgggaaagttgacccctgctggattttgatcacgtgtaatactccacgcgtagactttgggagtagttggcgacatgcgcttatcttacagggcccgtcgactcctttgggcttactgggctcaaggagcccggtaagttctctagtactttggtgaacaacgccctatattcaacaagttcttgcaatgactacaatgaacgctggcattgatgacacttcgtccaattgccccaccctacatccttacacttaccctgtctgggacgactaacgataagaagaacgggcaaagctccctattcttttcatgagaaggattacacttggcacactcaccagggcgacattgctatctctagcggcgacataacaatcagtagtaccgtcggcgatgcttcgtgcggttcaatgtacttgaggacggctatactcgtacaggataaaaagtagcagcgggcgacttcttggccggcgctgccatatcaccacatacacgcaggctgcatcgcgtgcccaaaactttattttgcggttcggcattttctcaagtaaaagcaggcgaaacgaaggaatctgattcgccgccgggatctgatccagcgccgcgagctatttatagctgtaccatttctccggtacacgggtgttccctggctggatgaaatgaggcaaatggcggtggtgctcctgagagagtgtgtgtgggctccagaaaccgcgtgggagcgaaggagcgaccacagtccagagaggcagaaagcgacccacgcccgcgcgcgccccctggccattccccctcaccccgcccccccccccacacgacggccatggccgagcccacgacctactgcgtgtgccagcaggcggacggcggtgcgttcctgccctgcttagcgtccatttcctcctgctgcttatataaccttaactgatatatacttattcgttatgctatgctgtgttatgttatgttattacgcagccggcatcatgatcgagtgcatccgcggctcgggcggctgcaacggctgggtgcacccgagctgctgcgggctcatcctgacgcaggaggagctggaggcgctggacgcgtacatctgcccgctgtgcgagaagcccgacgacgacttcgccaagatgacggccttcaacacgagcctggccaaccgccaggccaagcgcgagcgcaagcgcaagctgctggcggcggccgacaaggacaaggacaaggacaaggacaaggacaagaagcccgcgcgcaagccctgggtctgcgccgcgtgccagcacccgaaccgcgaccgccgcacgcgcgagtgcgaggcctgccacacgcgccgcgtcatggacaagaagccgagcaagcacaagagcctcaaggagccgagcgacgacgagaagtcgaggctcctggcgcagcagctgcgagctgacgacgagcgccgccacagccagcgcgcggccaacaagaagaggaagtcgtaccacgtgcccaactcggatgaggacctgggcagctccgacagcgacgacgcctcgtacaagaagaagcacaagaagcacaagaagcgccggcaccacgaggacgacggcagcgagtcggacgaggccgagttccagctggacacctgcaagctcaaggacaagtccaagtccgagcctgaagagcagcccgtggcgaccaacatggtcattgaaaagatcatgggcgtgcgacaaagagaggtggaggagcccgccccgacccccgcggccgactcggcgagcgccaacttgttcgcgaaccgcccgaccaagacgtcgatcactgagtatctgatcaagtggaagggcttcgcgtacatgcacgcgtcgtgggagaccaagcaggtactgctcgacctggacccgctgacgaacaagcagaaaatcaagcgtttccacgagaaggagcagcaccgcctccaccacccgcaccgccagacgggagacctggacgaggactctcttgcggtggacgaactggaatacttcaacccggagtatctggagattcaccggattattgctcaccgcaaagacacgccgatgcctgctgaccccaatttcccggatgctcctgtggatgacggcatgcgctactacatcaagtggcgtatccttccgtacactgatgctacgtgggagcgtgcgtgcgatatcaaggatgacgctgcgctggctaaatacaagacctcaattgttgttcctgacgaagaggtgtggaagccaagaccgcgtccaactatccgtgaataccgcaaactggacgagtctccgaggtttggagaggaccagtcgctgtcgcttcgtgcgtaccagctggaaggtctgaactggttgatttggaattggtacaatgagcgaccaagtatcctggcagacgaaatgggtctcggtaagacgatccaaacgctttcattcctgagccgactgcgtgacgaccccaaaatcaagatccgtggaccatttttgatcgtggccccgctgtcgctgattgtgcagtggcaaaatgaatgtgagatgtggacgactatgaactgtgtcgtctatcacggcaatagcggatcacgagacattattcgcgactttgagtttcactatttggatgaaaacttacgcccggacaagaagaagccctaccgctttaacattctcgttaccacgtatgaagttgcgattaaggacatcgcggcactctcgaaaatccattggcgctgtctcgtggtggacgaagctcatcgattgaagaaccaatcttctcgacttgtggaacaaatgcgttctttgcgtcgcgatcactgtgttctcctgacgggcacacctctccagaacaaaactgaggaattgtgggccttgcttaacttcttggatggcaagtcgttccctagtgttgctgacttccttgataagtttggcgaccttcatgaagctcagcaagtggcggacctgcacaaaatgctgaagccgtatttgctacgacgtgtgaaggaagatgttgagaagtcgttgcctccaaaagaggaaacgattgttgaagtggagctcacgcccgtgcagaagcagtggtaccgcgcaatctacgagaaaaacactgcgttcctaaaccgtggtgggaacccgcgcaacgttccgaatttgatgaacgttatgatggagctacgcaagtgttgcaaccacccgtacctgaacaacggtgtcgaggaaattttgaacgaaggcttgacgactgatgcgcagcgccacgagatgatggtaaagtgctgtggtaaaatggtgcttattgacaagctgttgccacggttgaatgatggagggcacaaggtgcttatctttagtcagatggttcgtgtattggacatcatcgaggattatttgcgcttttgtggatacctctacgagcggttggatggtaatattcgtggtaatgaccgtcaagctgcggtggatcgatttgtgaaacccgagtacaagcggtttgtcatgctactctcgaccaaggctggcggtttgggcttgaacttgacggctgctgacacggtcatcatttttgacagtgattggaaccctcagaatgatctgcaggcccaagcccgtgcgcatcgtattggtcagactcactcggtgaagatttatcgtttgatcacgcgcaaaacttatgagatgcacatgttccacaaagcttccctgaagttgggactagataaggctgtgctcacgcatatgcggcgtgagaatgaagaagagggcggcaagaaacggaacaagagcgcgaaagcacaagagtcgaaagagatcgatgagctcttgaagcgtggagcttatgatgtattccgcgacgatgataccgctggtgaacagttttgcgaactggacattgaccagatcttgcagcgctcatcacaagttgtgcagtacgctgaacaagcacagtctagcttctccaaggcaagttttgtgtccgccacaacctctgatgatgtggatttggacgacccggacttttggaagaaggctgtggggctaacagaaccggacccaactgaagcagaagacctactaccgcagcagcgcaaacgcactcgtgttgctcgctttggcgatggaggcagtttctcggatggcagcgtttcagatgacgaatacgatcaagaaaaacgcgataaggaaaaggaagagcgtgaaaagcttgaggagaagaacattcctcgagaatggacgcaaaatggacgcgaccggttgcagcgtgcgctgatgcattacggatttggtcgttgggagattattcggagccagagcggtggcagtcgctccatgaaggaggtggagctgtttgctcgaggttttatttatgtttccggtctggcttgtgatcagcgcaaggatgactcttcttttgtgaaagcgtctatccacgcggctactacggctcaaaaggaaaatcttatcgatgaagaggaattatcgccagttttgaaagaggaggatttcgttctcaagtcaaagcaaggtggtggtcgacgtgtactggtccgactagacatgctccagcggcttcagcatctggttactgcggcgtgcgatgcgtgcgacgaactgtacaaagattcggaggatagctcgaagcctagaccgaaaccgactgctagcatcgacgaacgggccagatattatggtgttgacaagctgatcccgcatattgagctggtagacgttggtgaacgaccggcatggacgcagatcacgccatggtggaacgaggaagccgatcgaaacttgttaatgggcgtattccttcacggctatggccgctgcgcccaaattttggccgatccgcgattgcacttcgcacggctagagaaggctgctcgtgaccaacaacaagcgaatagtggtgccgtgttaaaccagaacggtgtggcttcctcagcagtagtcaagaaagagggcgcagcatcggcagagggaggcgatgacgtggatatgagcgatgctgactccgaaagtgcatcaagctcggttaacgatgacagcactcctaaaagcaacggtggttctggacctctcaagtctgaaacaggtgcaaacactgcaatggcagaagccaatgcttttaagcaaccggaggtacagcacatgaaccgattgctaagctggttgctttctgcggaggaaatcaaacggcgacacggaaaggaaaggtttaagaaggagcgtgtggcaattgagcagcggcgtcaagttgcccaggaaatgcaagcgcgatcgaggacgttgcgtcggctggagcttaaggcgatgcagcttgcccaggtggatattcttcgacacatggcggtattgcacaatgctcgccaactacccgatccaacgcttgtggctcctccgcagcatcgcatgaagaatacggactggaccaaggaagagcgccgttctttcgcctacatgatggcactccacggtgctccgcgtattcttgcgaagcgggctgttgttgctcctgatggaagagcaactccgtcgatgctgccgtttgtgacagagcacgctcgccccttttcgtgggaaacagatagcatctcgtggctcaatattgtggagtggggcaatttgaacaagagcgcaacgctggcccgcacgttttacgagacaaagttcgcccccaaatgccgtgaagttgcacgaatgcgggctgatccgcttggctcagaccagcgcgctgtggcgttgggcgatcttatcggcattgaattcgtggacgccttcgaaggtgtgctggcacatggactcaaggctcgtaacacagcttgggtaaccatgcgacgcacacagttactggaggatgtgttggagattcttacaaccaagcgggctgcgcttgaggattacctacgatctgggaagcagactctggtggaggatatgcctgtgtggtggtgtccttggatccacgacctgggagtgttttacggtatggctcgctacggtgtttacggctgggagcgcattatgctggaccgtcagctgccatttcaccgccaggcacgagagcaccacatccgtgccgtgtttctggagggcacgcccaccttccgccccctgtatcgacaccacttcgagtcggctgccgagatgaacgcttggtttgttcgcgtcctgaacgagttcccgtcgctgtcgattctggagcgtaaggtggagtcgatttgcgctgcggtgctcgaagagtacggagctacagccgagcgctacgtggagccggaggatcgtcgcgaattcagcttgtcaccgccaggcaactgcttcgaggagctgattctggcgcgtgtgaagcacgaggaagagctgcttccgagcatcgagcctgtcctggcaggagacgcgtcgtctggaccccctgaagcgctagctgcgtttttgagtgagtcgcagggccgtcgcgacgagtatttacgagcagccgaggcctcgaacgctatcggctccatctcctctagctccgcggccgcagttgcgacgaatgggcagcaaagccaagaaggcgaagaggaccagcgacagcagacagcgtcgtcgcaaagccctattcagatgctggtctcgtagagcaacaaacaagaagaacgactaatttgcaatcacgggtgggtaatacatgctgagagataatagaaaatcgtctttgtctatgatgaatttactcgttctttgcgtgtgtgaaggctccaggtttgggtttcgtcaggttttcctccgagttcttgcgcgagcgacgtcgttcggccttcgccagtagcagcgcgcgtctcacccgcttgcggatgtagtagtaggccacgatgaagatggccccaagcaccgacaagatggccacgacgctgacggtgtatcggcgccaggctgagggcacgtagatcttgaggtggcaagtctggaagttgccgtcggcgtcctcgatcccctgaaacccgtcgacgcagtcgcgcgtgccgtacacgtagcctgccgggatggagcggtggaacgggtcgtgccagggcttatcgcacatttcgcccgtcgcctcgcagatgtccttgtcgtagcgctgcttgcacagacacgtgcacttcatggggagggtgcaattgccctggccgatcatggccccgttcacttcctctttgccccaacgtccgcctccagtgccacacggatccgtacgaaacacttcgaccttgagctcatcgacggtgaagagcgttgggcgaacggaggctgtgaccgcttcagtcaactcgcagatcggcgtcgagcagtcgaagccagtccagccttcagcacaggcgcaaacgtccggggcgacgcacagtcctccgttcttgcagcggtagcagccatcgccgctgctgacgatactgctggccatggcgtcaatgccggagatattcccagttgtgagattcaggtcgctggccacgacgctggcgttgcagatcgggtcgaacactccttggatgcagatcggcaacgcgcaatccgagccgaagtacccggtgagacccgttggggctgtcggatagtgatcgtgtagggtggagttgacggtgacacatcgacattcatctttgctgacgcagacgccgccattacggcacccggaggacacggtggcgtattggtcggcctcgaggaatcggcagagcggaatgttgcagtcgatgccggcccagccatcgccacacgcacattcgtctggggctacacacgcgccagagttgtagcactcgtagacgccctcaccaggggctgaaactccgtactcccatgtgacttcatccactttcgtcacattcacgtagttggtacgaataacgcggttcgtcccgttgtcgctctcgatgtcaccttgctcccagaccacgttaccacagaggaaatcgttcgacacgcgagctacgttgaggtcgtcccgataatccagcaggttttggatctgctgggcgcttgtgagtgcagcgctacgctttggattgggctcaggatcaccaaccgagcagccactctgaaacgagtggccatcgttggccaccagctccacgtcgtattgaggacagcgatacgtgttgcagttgcggaccgctgtggcgctatcataattgccacgtaatgtacggaagctgctggacgagcgggacacaacattcagcacgaaccgtttagcctgaacgcagataggagtgttgcagtcgtacccagtataacctgtacgttgcgctcgtccatcaggaagctggaacacaggcttaccaccgttctcgcggccgtctcgccaaattgaatcccacgtgatgcactgacactggtcaggagcgatgcacgtcccgttattccggcattcctgcgcgcagagtgcaatcgagcagtctgctcctgaccatcccaaggcacacgtacaagtgtctggaagcgtgcagttccctccattcatgcaagtttgcgtgcataccgggatcgtacagtccgctccagtccaaccaggagcacagtcgcaaaccccgggggccgaacacgtgccgttgttgaagcacccgcgcacgacttgatccacgcagtctccaaacactgaagaattccagaaaccgcggcggacggcgtcttgcgctgtgtacgtgacttgaggtcggtacgatgcatctgtatcaacaacaagcacacccagtttgcctgacaagaggtctttcgcttgcgtccctgaagagcaggttcggttgaattcgaggaggcaaacccccttctgccaagctctgccggggatataaccccacgtaccgccacgtttccaaccctgtcgggtatcgtctaatggcggcttggacaaattgtaaagtggtggccaagccatccccgtccattgtgtgtggtaatggccatcggcggataattctcggtccatgtagcgcgaatagtagttgggatggtcgaagtaataggccggagacccatcgggcgtcgctggtttctcccattccgtgatactgcgaatcgagcatgcatagccaccttgcgttggtttgtagcgtacaccacctcgagtctctgaggtcacggtcacttgggtgtacgcaatttgctcgactgttgcagtgtacgtcggattcgaaacagggtgtcgaggatcagtggcagtcgggggttcagcagctagatatgtgacttggtttggggagtagtagccctgggaacacacaggagtgcggcaatcaaacccagcccaccccgaggcgcattgacacacatcaggggctacgcagctacctccgtgggcacaggcgtaaactccttgtacaactcgccttcgctccacgagtgccacctgtcggtcactggtcaatagaaacggaggtgaaaaccccacttccgctttggcgattcctctccaggctgcagaggcattccatccgtacggcttgacgggggcaaaacggtaaaagtcgctggttgcgttgccctcggaaagatactggaactgtgcgagtgtgtcgtcccccagctcaagcagaagacaatcgccgtacgatggtggggtcttcccttttgccgctaagccacttgacgcgttcaccacaggactggacgtggtgtataaccggtgaagacagtcaaactcgccagtctcaagacaccagcgagcgaaatcacagggcacgtagctttcaacggatagcgggcgtgctagggcgttcgcgtatccacttggatgcggcacaaaatcgccctgcggacagatcgggaggctgcagtcgaatccactccaaccggtagcacacaagcaggaatcgggtgcgacgcaacttccaccattctggcacgtctgagcgcacaccggtacacgacaatcggtgcctttccaggcgtctggacacgtgcacgtgtttggagctgtgcaattccccccgtttccacaagtttgagtgcacactggggtcgtgcagttagcgtcaaaccagcctgaagcacacgagcaagtgtccggtgccgagcaaacccctccgtgagtacaggtttgaacgcactgcggtgtactgcaagctggaaattccccataaccaggcatgcaggcacatttgtcaggacccacacatatctgtcgagctccacagctagtactgcagacgggtattgtacagtcatcacctgtccacccagaaggacatgtacacacgtctgcagcactgcaaactcctccgttctcacaaaccttggcacaaggagcagacagcgctcgaatgcggttgttgcccgcgtcggcgatgtagagaaaatctgttcgtgataatgaccggcttctagcgatatcaagccccgcgatacccagaaaacgcgccgccaacggaggctgagcgtccaggtagccgcaaccatcctgctgggatccgagtggtgcattgggcgcccctgcgacggactgcacctcgagtttaggccgtagatacgccttgacactgaaaagccgagcacgagtatcctgagtcgacggcaagttaagcgacgtcaccccattcgcagtagagccgactgccgtggatgcctttgacgctggctgtgttccacgctccagagtaatcgttactaggcctccttgagtagcagtgatagcgccactatgaatcgcagcgaggcagatcgaagaaacatcgctgtacagtccagaaccgtaaactttggtcgaaattgtcgtaggatcacaacctgcaggacaactcaccttgacggtggtgccgtattcgaggtcttgaaacacactggtcgtgatggattgggtgtctgggtcgcgtaagggtagcgcgagatctccttgtactaagccgtcggctggaggtgagcctgtacagtccttcaacgttcgtccagatatcgcggcgcccaggacagggtcgaactcctcgcgctgcagatagttgaggaaaatgttgttggttgctggcgatgtctggaggaaaagctcgtccactggctgctcgtaggacgcacaaccactcggacgcagcacttgcgttgctcgagtcgaacacgtgacagaccgcgagactagcgaggcaggagatatctgccgcactgtgcagtccgtagagctggcaacgtacactcgtccgtcagcagcgaaagcgactccggctggcgcgttgaaagttgcctcattcccttcgccatcgatgtgtccaggtacattggaccccgcgagagtcacaacgcggttggttgacgtgacggtctcaattgtagacgcaaatcctccgtcataagtcactcgacgtacgcgatggccatcggccaccaccacggtacgctcagcaccgactgcaatggcgcgtgggctgtcaaattgagcgtaagttaagtttccgtctcgaaatccacgctcgccacgcaaacaaggcgacaaacagccaggtgtatcggcatcttccgatggaacgacgctaccagcaagcgtatgtgtagttccgtttggttcaatacgccgaatcaagtgattgccagtatctgcaacaaatactacgccatcagcatcaaccgctacgcccatgggcgagtcaaagcgggctccgaggggatcgccatcggccagaccggcgtgagggctctctggctgctgcgaaagcctcacagtttccacgccagcgccgcaaagccccgaaagacacgacaccaccccgctcttgatctgtcggatgcgatggttgcctgtatcagccacaaacacagtcacggtcgcgccgccgttcgtctccagcacagcaacatccgacgggtacgaaaaccgcgctgccgagagcgcagctccatccgcaaacccctcaatcccatcgcccgctagcgtggacaccatcttcgtggtcggattgatttttctaatgcgatggttggctgtatccgccacgtaaaccactccattcgagtccacagccacaccgcgcgggtggttaaacctcgcagttgccgctggtccgtcgaggaaccctgcagtaccttcacccgccacggttgtcactcttccctgtgctcgtccagacgcgccgaacgctgcggaatagctccaaatatccgacgaagcagcgtcactagtatttctcctcgggtgcgctcctctgtttgtcaatgacccggactgcgtgccccaacaccttacgtcacactgcgagaagtccgtcgagaacggcgacaagcagcctccgcctgacaagaacaagcagagctgtgtagcaccgccgtagtcgtagcggtgtttgccccccaccgcccacgggacgtcggtcaccgtcgggacgttcttgggcagcgtagaccacggaatgccttgcagctggaaggcgcagcgatcgccgctgttgccgttgcaggcgaagtcctcgcagatgtggcacttgctctgcacgccgaagacgccgcacgcgtggcggatgtcctggtcgttcgggttcgctcggccctgccactcgagcgtctgcgccggcgtcttctggtacgcgaagggccactgcggcttgcgcgcgctctcgcaccacggctgcgtcgtccacgtgcgtctcagcacggcaccgtacaagcagcagcaactagacagcaacagcacgcacgccaacaagacagcgacagccatgctgcggcttgtgatgcattgatacattggatgcgtcgcttcaagatcaggacctgtgtggtgtacacaaatccgaaattaactccgaatttgtcgtggccagtgctttgcatggaagccttgacacactaaaaggcaacaagtcgatactgtagctgtagaggcaatgagcgcgagcaaggaggacgtgaagcggcgccaggtgatcgtgatcctggagcaggcggcgctggagacggtcaagacgtccaagggctaccagctgctcaactgcgacgaccacaagggcatccacaagaagctcaaccgcgacgccagccagtcgcgccccgacatcctgcaccaggagctcatggcgctgctcgactcgccgctcaacaaggccggctacctcaaggtccgctactacagtgcaatgctatcgatgcagtactattgcagtataacactgacgtcgttgacgataattgctattgctattgctattgctattgtcgctgcagatgtacatcaagagcaccaagggcgtgctcatcgaggtgagctcgcagatgcgcgtgccccgcacgtacaagcgcttcgctggtctcatgggtgagtgactgactggctgcaattgatattgaggtgtttattgtggggaactgagtgtggttgttgttgatttttcgcagtgcaactgctgcacacgctcaagatccgctcgtcggacggcaaccacacgctgctgaacgtgatcaagaaccccgtgaccaagtacctgccggccaactgcaagaagtacgcgctcacgcgcacgggcacgctggtgaacccgtgggagtgggtggagacgctgcccaaggacgagcccgtggtcttcatcttcggcgccatggcccacggccacatctccaaggagaactgcaactacgtaagtacagctctacaatgctgtaatctgctgtgtaagttgatgaagactgacgtgttttgatgctctccttgcagctggacgagaccatctccatctccgagtacccgatgagcggtgcccaggccatctgccgtctgctcaacggcttcgagcggcactggggcatcctgtaactttattctgccggatagatgcatgcgagtcttcgctgggtctccgacatgttgatgatgctgcttcactgctaggcttaggaacaaacagcgactggagcagcggcaatgaaaatgaaacgtgttcgcagttgaatgctgaagtatgcctttgcagttcgcatctccatcgtcaactctgcggcgcaggcggaaggaaaggcgacccaggcaggtccttcgcttcctgcatcatcttctctccaggtgtgagcggcattgcaccgtgcagttgctgttgccgctggtcgtacacagccttcctgatggcgccctgtgtagcctcgtcgtactcctggatgttccgtcgcgagtcgacttggctcgtgtcgatttccggtcctcctttaagcgcactcgcccaccacgtgggcttgatcttctccagcgaaatgttcagcgtatggttgctctccagcgaccaaatgctctcatcagctcggatcttctccaccagctctcctaccagcaacggtttgctcggatcgctcttcatcgacacccgtagcctcgtcgactcaatccgacagtccaggtccttcgcacgcgtgccttgcggcaactccatctgaatctgcaacataccacaaacttcagtatccttgcagtgacactgcatgtaccagcacacgcaacgcaccgaaacatcctccagcgtctgcgtccaagtgtaattagcagccactccaccgttccccactggcactgtagcaacatcaacatcaacaccgaacatgaacaacgtcagcactactacgcactgtactactattaccaaatcaaaatcattgtcgaccttgcttgccgtcgtccgtcagctgtggcttgacctcctcaatcttcttggccgtcgggctctgcttggcactggggctagcagcagcagcagcgctctgtgcttgtgtattattacttgccacattggcagctccatcgccgccgtcgagactccgcgtcgggtacttgcggaaggccgcgagcaccttccgctcggcctgaccaggtaagaagcccatcttgtgcttgcccgggtcgctcgagaccgcgtagaagtccgtcttgcggtgcaggaagtcgaagaacgagtccagcagcgactccacgccgccgtgttgctgcgccagctgcgtcagcagcgcgtcgaagcgcccgggcgcggcgctcatggctcggtccgccatgatctatcgttcctatagaatactgcgcggccattggctgaaataccgcacccgaggtatctaacgttaaggactgttgtcaacatcggccatacccacatcaagataaacagcgatgtggtcggcgctgcggcacgcgtgcgaggtcgtggacgtgtgcggcttcgcgcggcggcacaagaatctgctgatcgccacgggcgtgggcgcggcgtgcgcgggcggcgcgtactacgcgtaccggcgcgtggtgggcgaggccgagcgcttcacgcagcagctccagctgcagatggcggagcaccagcgcctgcaactggcgctgggcagcacggccgacgagagccgcgcgacggtgcggcgcttcctgccgcggctcaaggcgcggctgttccagctgctggacctggagagcgtcgtgcaggagctcaagacgctggacaagacgcagaagacgcggcgcaacgcgctctgggaggacgccaagctgctggccgtcacgcgctacgtgacggcgctcgtggcctttgggctgtggcacctgctggtgttcgcgcaggtctccatcatcggcaagcgggtgttcgagaagagcgacgcggcggcggcgctgtctgagcgccagaagcagcgagagcaggccgaggagcaggcgcaccacgccttcctgacctccgggctcgagtacttcctggacgaggcgctgggcaagattaaggcccatgtggaggccgtggtgagggacaacaagcacctgcagggctggaaagtcagtcgcaaggcggcggtcacggcggacgagctcaacgagctgctgcaggcgctgttcctggcggtgctgccgtccccggcggcggtcgcagccgcggagaagcaggaggactcggcggagctcaggaagtggcgcgcgttcttgatctacccggacaagcaaaagggccaggacgagcacgtgatcagcctgctcaacgacctgtgggacctcctggagagcgacctgttcatgccagcgttgcagcacagcttgggcttcctgtgcggcaacgcgttccaagacctggacgacgtcgtctacggaccgagcaagccggagcctcgagttgtagaagatagcgctgccgagccgcctcagaagaagcccgcgcctcctctcgcgaagctcatcccgtgcctccagtccgagatgaacaagctgttgatgtcctcgggaccagagagctacgctgccaagtactcacagggcgtgggcgagatggaggcattccggaacttttacgaggccatcttcttcgagcagagcgcgcaggactcgtacatgggatcagcgctcatctagacaacaccgtagctcgcggtgcggcgctgctgcgggtcggaatgcaacatgatgctcgtttactatgcctacagaagcgtagtacaggtatgaaagcaagccgaacggaaggcgaggcgcacaatgcactctattgcttggaatatgtactcattattgaaaaatgcatgcacacccgttccattacgcctcggcttgcaaagcgggaggaagcggtgatctaacttggtagtaaaagtgtttacgcgagggaggttgggtagcaagcaacctcaagtcgatagttcaacaccaacaattcagctcccctcgtctcctccgtgagttggtgggtctacaagcgcgcggcggcctccatggaggccaatcgcatccgcatcattttcagatcgtagtcgacggtgacgtagcgatacacttgagctttgtctgcccaggacacgtcaatatccgcttcttctggagggtggacgtagtcgacacagtagttgccggcgcgcgtgcacttctcgtggccgtgacgctcgcagatcttgcggagcgtcatgacacaccgaagattggccatgtccttcagcagtgccagcactttcagcattagggtcggcccgaacattacgttgttgataaacaccaccgtggcatccatcaaccgggcttcagccggcggctcgaggatatctccctgtagcaactcgatctgtttgccgcggagaacggggacgtcgcgctctttcagccgctccagcgccttttgtccctctaacacgcggttctgcatcagctcaatgccaattgccctcttgcacggcgtctgaagagccgcttgcaccaaaatcttgcccgtgccgcagccaaggtcaaagaacacatcgtcctcttccagattcaagaacggcaggattgtcgaggcgacggactccaccgacacctcgccgtacgtcatcaggcgccgaaattcctccagactcagctctttgacctcctgggagcgtttgcagtggctcgtctcggtgagcaccgtctctctggtgatgttgtacatttctcggtcgtcctgctcctgctcctcgtacaggtctgcaatcaggtcagatacgtacttcgtctccaattcgagcgagtacgcggtctcgggcgcatatgcgggctcgagcgagcgtcgcgccttcctgctgcgcttcttctgcggggtcttcttcttctcgtcctgcacgggggacagcactcccttcggcgtctcactcttgaccttgatacctgagctcttcttgcgctttgctgcagtctctcgctgttgcttctccttcaccgccactgctgcgcgcacagccgccgcctctgcagcggcaggacgcctgctcaacaacttctccatcttgattcccctgtgccgcttcggcttcagcggagacttgcgcgtggactgcagctccgaggggctcaggaagtcaacggcgcggcgcttgcgtccgctgcgacgcagctcctgcgtagcagcgggttgctgctggtcgtcgtccttctcttccttgatagtcttcatcatcttcctgcgcttgcgctgcggcgtctgcgcctcctgcggtgcctctccatcggaagaggaggaggacgaaactgcagtggttgacgcggacgagtcgctggcgtttcccgacgtctccagaacgagcaagacatcctccatgacggcagcgacggtggcggtggtctcggcgtccgtcagcatcgaagtgtcttcggcttgcggtgctcggcgaccttgcgattctggcagtctatggcgtcgagaggtgagctgattagcccgattcaaatgttcaaaatagcggtaccacaaatatggtacagtaaagtcgagatcttgaggggatccgcccaagcccagcgtggcgaagcgtggcaaagcttggcaacctggccgttcgaggcgttgcaacgtgcacatgcgtacgcagtagatattggccaagtgctgtcatgctttggttaatgaagcgaaaattaggggagacggggtctctgaatggaagactactgtagctagctcacgatcatacttatgcgcgggacgtcgaggcgtttctcgccggcggcggcctcgctggggctcatcatacagggagagacgattacagcgcgctggcggtgcgcgtgcgcggctgccactggtagaggccgtggtggtactggaagccgaccttgttcacgagctcgtcgctctccttggggccgcgcgagccgaacttgtacgtaagcggcttgaccttctggccctcgatctcgtccagcagtggcgtgaagatcttccaggcggcgcgcagctcgtcgtcgcgcacgaaagcagcctgcttgccgcgcagcacgtccaggatcaggcgcgtgtaggcgtccggcacctcggcgccctcgtagcgctccgagtacgacaggtccagctcgctggagatggcctgggtctgcagaccggggcacttcatgttcatcttcatgtacacggcctcctccggctgcaggcgcagcaccagctcctgcacggggatcttgacgcccgggaacatgtgctccgcaccagggggcgggcggaactgcacgcgaatctcgcccttgcgctcgttcagagccttgccagccttcatgatgaacgggacgccagcccagcgcgggttgttgacgtacatgatggctgtggcgaacgtgggcgtgaccgagcccttgggcacggtcgggtcctccaggtagccgggctcgttgcgctccttgtcgccctcgtactggcccagcacggtgttctccagcttgatgggctcgatgcagttgagcaccttgaccttctcgtcacggatgtagttcgagtagtccttgccggcggccatcacaggcggctccatggccacgagcgacagcacctgcagtaggtggttctgcatcacgtcgcggatgatgccgtacgagtcgaagtacccgccgcggccctgcgtgccgatgtcctccttgaaggtgatcgtgacgctcgacacgtagttgcggttccagatgggctcgaagatggcgttgccgaagcgcagcaccagcaggttctgcaccatctccttgccgaggtagtggtcgatgcggtagatctcgtcctcgccgtagagcgcgcccatgtcctgcgacagcttgtcgaacgaggcgaggtcgtggccgaagggcttctccacgatgaggcggttccagccgcgcgacgtgagcgccgccttcttgatgctcgtgccaatcggcacgaagaccgtgggcgggatggcgaagtagaagaggcggttggccacgggcgagccctgggcctcctcgagggcctccatctccttgctcaccttgcccacgtcctcggccgagtcgtagctaccgctgcggtagatgcacttggcgaggaaggcctccttcttggcctcggcctcggcggtcttgggcttgatccacggcgccatctgcgcgcggaagtccacgtcgttcttggtgctgcgcgcgtagcccacgatgaccacgtgctcgggcaggtagccggacgtgtagagcgcgaagagcgacgggtacgtcttcttcttggccaggtcgcccgaggcgccgatcacgaagatcgtcagcgccgtgtcgaggtactcgcaggcgttgtgctcgtccacggtggggagggactcggtgctgttgctggcggagaggctcatcctggcgggtcttgcgtctgcttcgtgtgcgtcttcttggtggatctggctgcggcgaccgagggtaaatcggcgtttgagctgagagagcattgccgaactgcgggccccaagcagcctgagcagtggccgacgtcatttcacgtctcgctcgtgttttcatcaacaacggtaaatgcgtccgaattagatcttttagtagcgaattagggtatttcgcagcgagttagagctctcgattatgtgccacccaacacttccagcgcgccgcgattcgtccaaaatcgggccttttgtctgattggcgcctggcaagagcaaatccaagttcaacgtgctttaacgggaaagattccgtccgcccttcggaaacgcaactggcgaatcgtagcgcgcaccggcacgaatcaccccgcgcagtccagcaggcacgagcgcagtatgtacgtatcgattccccattgcgctgaagcgcagcattcggaatctgggctcgcgcatggaaccgcccgcaatacaaaatgtaggtaatcatatgacggggcataattggttcgttttttttctcagccaatcggaatttctcaggcttttcaaccaatgaccaagatggcgcatatgtactggcgtaacggggaattttaatgcatgtactggtataggcgcaagcacgctgccggagacgagttcaacgcaagacgctggttcgctgcgttctcacggaggaatcgaatgggctcttcattgtcgatgacagtagccgatcggtcgaatgcaatcacttgagaccgcttctggacatccctacccgcgttgccctaggaattcaaaattattgtgaaattcacgttcaaacgatggatctccagtgaaggccaattcgctccgccggcacagatctgcgagggaaacgttgcacaacatgctgcagcccgcttcgcgcgagcatgtacgcctagctccgctgctgcagccgcaccgatacgaagctctgatccagcatcgcaagtaagggctggatcatccagcccttacttgcgatgctataacagggataccgacgcgtagacacaacgacaccgcgcgagcttgcgtattctcggcacggttgcccaggtacatgagccacatcagatcaaacaccaccgaaacagtttccttaatgcgcgtcttatcctttttgcccctgctgtaaaggccttatcacactgtgtagacttgcataccatgtcctcatcgacgaacaacttgctatcaggatcgctgtccttgcgccaagtctctgtcagcatattgtaggcaccacgtcgcgtttcgagcacaagtagcccgcggcggtacgtaacggttgacagtatgcatgcgttcatcgatcgccacacttccgtcatgtacgcccgccgtctaactttttgcgctgctgattatacaagtcgtgttgctagagcacggtttgtacggtagctcttgaaaacatccatgcgccaacatagtaatagcaatggaccagaacagtggctgcgaaaactctctatcgtgtaggtcagaggcgagaagcttagaaacacgagagctgagaggtggtactatgagggaggagacgggttgtgtgaactttagcgtaccaaatgactgtgcggccatcaaccgtggcaaattgggttcaatgacgtacatcagcagtaacaaggggatcgacgatctacgtaagtacgacaacttgtttttctacttcaagtacttaagtatttattatactacaaccaggagctgtatcaaagtagcaccgcagccacgcagtcgtcgtcgcctagtcacagtaatgcaagtactgtacttgtccaggccgcaaactgtgaagcattttgcaccatcgcacacgtggacttccagcactagtagatatttgtaaacgttaccagtgctccacaactgctcgtatgcacttcagaaagcacgagaagcatcggagttcatgcatcccatcgtagcgaagattgaacttggagatacatctatcattcatgactccaccacaaagattcgcaactttctcagtgattatttggaccataatgcgttcgtcaaacgagttctcacctataggaccttcccattatgctttactacaattaaggtaaaatcgagcagcttgatgtatggtggagtgcctagccttgcctgcttcccaggcatagcccacatcatcgtcagagatggccccgctggaagtagcgcgtaataccacacgaagaaggcggtgcgaatcatttttcatccgttcatccgtggtagttttgtggctgtgcagaacgcaagtaacttagcagtgcggatatcatagatgcaaagcattaggtcatacttggtcttaagtttgcaattagagagcgaccggtgtttgaaagggttagctgagctgtgctggctcagctcgaagctgaagatgttcactccggccccttaataatttagcgcgctttatcaacactttgcctaacagttcaaactggagcatgtagctgctgtggactcgctaatgaaaatcttcagtcatgcaaatattcgggtaagttaagaatttgtgttttcgtcgagggcgatgaagttgccctaaggtactcgaagttgctcaaacaaaggtgcttaaacgttgcacacctttgagcaacatttttcaccgaaggtgcctgattgaacgagagccgccgacacgaagactcctgccaagagctatcacccgtacgtggaggagttaccgtacgaaagcaagaccaaccacggctatgccttcgtcgtgtcaatgccggttattacactgaagggaggagctacgcaaccgcaggtgatccaattgcatgtctgctgcacagatacttcgagtatgtattacgtcggccgtttgaaatgcaaaacagtcgtcgccgctgagcacttccgaatgccacaggtttcggtggttgcttgcctgtcctcacaggcgggatctggcttgtggcagctcgatcagctgggtgccccacttgccatctctacagagtacgaacaggacaccggggagccgtccggccactcagctgagctgcagccaggaaccagtcacgcaaagctcaccttgcagaaagtgtcgtgcttttggtgagccagaacgaagaccaaagcgtgccgaattttctagaccgttgcatcacgcgggcttcgctatcctccagacccgatgccagcaagttggggagcatttaaagtagcgtaggaggtcatggcttcaataggacaatctctatatgaaagggggattaccggcacaattcctatctaacacgagtaacttaatacgacttggacctacgggctaatggtaaggaggcgacatgggcctcggtgcttacacggaccggaacatgttgtgctcgattgcgcacggggaggacacgacgctctccgcgctgtgctcgtccgaaatgcggaagtgctgagtgcacagccctttccgccgagccttcttctcgcagccggccatggagcagatcttgccgccaccgtgcttgatgcagaacccgttgccgcggtccttggacgagcatccctcctccttgcagaggcgcttgccaccgtggctgtggcacaggttgttgcgctgcgagacgcgctcgcagccctcgatcttgcagtacttggaggcgcggctgcggtgggtgccgctcgagtgactgggcgaggcgcgggacttgaccgggtacatggcgtgctgcacgggggtggcgtcggcccacgagcgcttctttccggggaaggacgggcccatcgacgagctcatctgcgtgtacgacgtctgcggggcgaaggcggccatgcccgggagcggggcttgcggcatcgtagccacgggcagcacgcgcttggccatgctggggctgatcatcgtgcgcagcgagggcatgggcgccaggtcgcgcgacacggggctcaggcgcgggtactgcgacgacggcgcggccgaggccgtgggcgacgtggtctgcatctgcttaagcagcccctcgagcgacggcagcttggggttgatgctcaggttgagcgtgggcgtggcgggctggtagacgggcgactgcgcgacttgctgctgctggagctcctgctgctgggcctgctcggcggccgcgaacagcgcgagcggcgggtagtcggacagcgactgctggctgcgtggcgcggcgaaggccggggccaggaagggctgcgagccgccgactgcgaacgagggcgaggaggtggtcatggcgatgtgtgtggagatcgaccgctgtgccactcggaaggcaaattctgaaatgagcagtgcccagcccgctgctgcgcgtggtgatcgcagcggccgcaagcggtgcgaaatcaatcgagcaaggattgcgccaaggggcggccgacctggtgtgcgccacacgagactgctggccgctggtctcccgtatcttgcgttttgtatgggccccagcgccattgcgacaccgcgctcgattacgagctgccgccaggaagagaagggcgcgcgtccgggtacagtatgacggcgcggccaccgctgctggcgggctggctggcattgggctcgcttggtacgaaaggacccgcgcacgcaggggccaaatagcgcccgaaaacgctccgatctcggccctccagcctccgcagtcgcctccagcgcgctagcagcggcccaacgcctcgcagccgtcccgcaccgctgcctacggcagcgcttgaagctggctcggcctcactcatccgcaggcaccgcggtcctttggctggcaccacacacgactggcgactggcggagtgcccgcgctgtcccacctcggtcggcaaaactgaactttttctaccgcttgccgcttccttccttgcacggcgattgcgtcggcgacattgcggggtccttgagagcccgtcacaacgcggccttcagccagcagggctccatggcgatcccccgagcccgcgccccggagtcgctacaacagcagcagcggaagctccagcatgccatgcggaccgctgcgctaacccagttcgtccgccggctgctgctgtgccgctctgaagcacttgacaagtgccaccacgtgcgacacgcgcgggagcgcaatcacgccgacagtcattcgcgacccgtgattgcgcgcctgattggcggaccccatctgcagtaccgccaggcaccgcacggacctttcgcgtcgttacccaccaaaagactggggagccttcatgcgtaccgacatgaaccaccaagcagctaggtgctgctatcgccgccgccgccgctaaagcctgcctcgagcagcgccgctctcgcttgcgtgccgccgagctgtagcctgaatccagctgcgcgattgcggcggtcacttccgagtcggaagttccgaccgaggagtggagtaatcgggcccgcgagcgagcacccggatgcgatttgagtcagatctccagctctgctgcgctgcaacgacgctggtggtactgtagactgactgtcttggacgctgcctgcacgccacgccaagcggctcacggtcgttgaagctagcgtcgccgccgcggagtcgagcccagccaaggcgagcacgcccacgctgaaccatgtggacgagcggcgaccaacacttgcaaaaaaatccggtgcggggagaaagatgggccgcgcacgcaccacgcggattacgtttcgtcggaacatcgccttcagttgcgctggggcaacttagccgtgtcatcgctgagtctgcaccttgagatcacttgcggagcccaagttggacggcagcaggttgctgggataacggcgaacacgaaagccctcaatattcccttcgctcaccacgctgcgttttttctctcgaaaactcctccatcaccacgcatcatatatgtaatcgtggcggccatcgccgtccccttaactatggcccacagttcccccacagtctatggggatacaacagtttcaagccagtaatttttgcaatctcggccgcccatcgctcgttcatttctgcaatggcacgggcgccaccgccagggtgtccacgcctgcctggcggccaaggaaggtggaagacgaagcgggttctaacttcgtatacagctgcgacgaagaaagctgttgttgagcatctgagactacactgcaatgttcgtttcactatagactcgttctttcctgatctaccaacagagaagtatcaaggaagacgagtattggtgctaagatgggctcgccagtatgactctatcgccgctacgtgtgcttctgtcggcggtgggggcaagcgaaaagctcgctctaccggatcagctacgatcttacctctagatgttgagctagagatcgtgagctggattagcgatttgcgcgccgagggcgttccagtcacgtctctaatgctacgcctgaaggcgttaagcgcagctaaggcggcgggagtgcaccgattccgggcgtcctctggatggcagtgtctgttcaagaggcgtcaccccctgtcaatgcgatcgcgcacacgccaaggccaagtcagccaagcagagctggacaagatcgccgcggaattctctcaaactgtgaaggctaaagcggcggaactgggtgtgtccgttatatacaatgcagatcaaaccggtgagtttcactatattttgctatgttttaacggaccgtactaacaggatatgtttttgctcttgtgctaccttttagctgcgtttttcgagaacttacccgctaaaacactgcatggcaccggtgagaagacggtgtgggtgcgctgcggtgggaagagcaaggaaagagctaccgtcatgctgctaggagactcgaacggtaataaatacccgccgtttcttgttttcaagtcaaagccatcgacggtattacaacgacgtgaagccaacacacgccttcgccatggattaggcgtaagcgtgtggaaagatgtcggaccagcgcaagaaaaagaaagagtccaagttcatggcaacgccaaaggtaaataacgcatacacgttgtattttatgataatactaacgtttttttttcaaggttggtggaatacttctttgtctgtagagtttctccgctatcacttcggtgcgagaccccaacccgagaagcctgtactcctcctctgggatgacttctcgggacactggtccaaggaagtcatccagtgcgcaaaggagctgaaggtggagtagctcaaggttccaccgggggcgacgtctgtctgccagcccgcggatgctacgtggaacgggcctctcaaagcgcgtctacgactgctctggatcgagcatttgaaggcccagcttctcgaccgagacccggccattgcgttcaagctgaagccccccaccagagccgagatatgcaactgggtgagctcggcctggaagggcatgcctgcttccatcatttccggaggatatcgtaagtgccatctggaagcggagcctcctgaagaagcggcggaggtagtgagcgagctcattagtctagggtgtatcgacagtcgtgttggtgagattcgccctgatagggactttgatgtagctgagattgaggaaggtgactcagatgaggaattgctagagtgcccagtttagtaatttttgtaaatacatctcccgtgcaaaattgggcgccctgcatttcagctccagtaggatgtatccctctacaaaacaaattcggtaatcgcgcaagcctataaaactgtaaatttgatgcattacaatggttttattgtgttaagctacactaactcgatctgtccagcaaccaaccaaccaaccctgtacggcactagcacttcagaacagcatgactgcggaagctggagaagctgtcgttgcttcgacagccacgagcggtagccaagacgacggagcttcaagccttcatgttaccccaacgccaaaccaacgcctctcgaccgtgcggaggacgcaacgctctacgccttcgccaagtgcacgtgtatcaccgtatccgctgcgtgagcgaacacctcctcaagtgctctcaccttcagcgcccctgagcgacgtcaagctcgcgtttcactagatgcttcatccgagagcggagaaaccgaagaagctgaccaacatcgtctacaactggtggttcagccgatcgtcaaagacaccgtgggtcagcgcgataattcaggaaaactgccacgttcagcgacatcaaacgcaaactttgggagaagtttagcagtcgcgtaaacggattgctgtgaaacaggacgacacctggtcggatgaagaccctactgaagcagcgtggagcagggtaatggtgttcaagtggaatacgcatcttgttccgacggcaaagtcggaacaagcctggaaccggtgggttgtatcgcgtaggggtgacactggcactttactgatcttcgaatacggcacgggtattctgaatggccgggcgctagaggcattcatgcaatcgtgcattatgcggcagcacactgaccgttccggagccgccgcagaagcctcgattcgtgagatcgtgacgcagctacaagatatttgggtggcaacgtatcaaggcagtgcggtcgtctggccgatgtgggctaatgcgatcatgcgaaacctagatcgctccacgtgggaagtcgccgtgctggaacctccaacagctacggttgagcagttactacagttggccggtggggaagctgagcaacatctagtcaaccttacgaggtcgacacgtgtcgatcttgatatcattgacgcttcaattgccgacaacagtcagctgaaaagggataagaaagcaatcggcgagcgcatggacaatcaagcaattgtcttgcaggctcgtcgacagacgctcgagggaatgctcgccgatattccccttccacctgtcacagctgtgcccgatccgatgccaagaatggtaaacgttgaggacaacgaacaccaaccgtagttcctcaagctagagtctttatttttctttagctttgagtctcgccaacttctcttaaaacgaatcctaattgctgttccccttcctcattagtgtgtgcttggatggttgagacgccggctgcattgcgggaatccatttccaactgaccacacgggtcaaagtgaccttgcatgctccatccacagtgctcgaaaaccttggacatgctgaagttctcagatcgtccgaaagtttctgcaacaaatggcagtaaattgttgctggacgactttacgtagtgtcgctgtaagcttcacttaatgtagccaaacatatactcgatcgggttgaagaatgggcaatatgccggtaataaaatcgggacgattccaacactgcgcaggaagtgaataatttcagaatcgcgatggattgaggcaccatccagtatccacacagagtttgagccgggatatcgacggacatttccacgagtggagtacgcaaagtcctggcagcaccgaaaataatcgactcgatcaaacgttccttgagtgtcgtaatagtcgatgattccggctacacccataaacgccagcacggacacccttggtttacgctgaaaatctccacgaattgcaattgtttgtcctttaagcgagtagcctcgctttcggatcatgccacggttgtcaaacgacacttcgtcgagaaacacaatgttgctatggcaccaattgacctgcgcaagctcctccacaaatcgaaacacgtccagctccttgatatgcatggctcgccgctccaatacttttcgtgttaggccagcgtcgtgaataagccgccagacggatgaaatggagatagtcatggcatgagcacgcaaaaacgcatcttgggcctcatcaaggtatgcaagcggatgctcagcgtaataatcgcacaaccactgctgatgggctgctgtgaaccttcgaagaacctttgagtctgcgcgttggtaggttccggtacgctcgtacacgttaatccaattgccgatcgtctttacagtctttttgtaaatacgggcgagctccttgcgcgaatgcccaaggaaatagaagccgtagaggcagtgaaacacggtgttagggtgggcatgttggcgcgtgacagcttcttccatcttgagaagttcttctatacatacagcatgacaaagatcaattaagttgtaacaacaccataacattttataggcattcgtacctccacggcttttgctttgaagagaagagcaaagggccaaaactctcgcaggaacaccacccacgcacggcaacactcgcggcgggtttcccttcagcacctgtacgctgctgtcgggctccagctactgcacgcacgcggctaacgctcgcggctccagctggtgcacacacgcgacgaagtctcacggcggtccgacttcaaccgctgcacaccgcggtggtctggctccagcggtgcacgcggcaaagagcccattttgtgcgacttttggctctcgtattagggggagcccacgtttgaagttgacgttcaaggtgtggccttaagataatgaaagagctgtaccggtaccaatcttaagtttgaacagattttgtagcatgcattaatttaaaaccattactactctggcccacttaagaaacaacatttctattaaacctcaactttttcagatcgcattggattggctattaatcggactgaagccatatgattggacataaagttcgactggacggcaaatcgacgaaatcgattagaaaaatctcaaaatatatacgagcaccacaacgcccacaggagcgctttcatactctacgatggttctccgcatcggcagttaagcgatcttcccaatggtacctatcattttgaatatcgctaaatttgtagccattacgcaaaaaacctaatgttacccaaatccgggtttagaaaacttgctctgtttccttgaatcctgctgttttcaagcagccaatgagctgacgcgaaaacaccaaatctcacctttattttgaggtattgtttacccccaactgataatgtttgaattttttttgacggccagatagaaatgttgtttcttaggtgggccagacgagtactcagtgtcatggggactattctaaagtacaccgtctgaattgttcaagcatgtactgcatccacgccgtgacacctaaagcagttatacagtctttgcgttttcctgattgatgcaagtcggtattcaaactaccgtattagggctggttctgcgtatctaatgaagtaagtttatgatgagatagctgcgttctctataagtaggatgatgttctgaggtgcttcctggcaccataatgaaccctcacattacatacatatgagttcctactatagtgcaactagcacaccaaatattgcagattgtaggctacctagccgttatgatagtggtgaggttcatgtgtgctgcttcatcaatagaaaacatcttgccatcgtcgtcgagtctcattagatccagtattagatccagtaaaagttgctgggagacattgatagccactagccagcttatacactttatttgccatgcaactcaaacatggttccttcgagcaagcctcagtagtctttggcgagcctgtggcataggacgcaggtaggcgacatcagcgaaggagttaattgcccccacaagaccgatatttggggttgtttctattttgttacgtgtagcaacaaaagatgtttggggctgtatcgtggtgggcgacgctgctcccatttttgctttcacgattcgaatactcaaacgctgtactctgtagttttcgtgcgcattcagacttcgtataagcattcaagtgcattcatatctgtgcgtactgagtaaatttgcttgcttaggtagccgcgttgagcgccatgcagaacatgtcagaattgattcgtgtctgagctttcgagtaagttcaagttagttcagttttgatgtttctatttgtgccgtcatgactgcagcagaacaagctactcattggcgacccgtgtccctccagttgttgctctgaggtagcctttggcatgaaaaaaaatatctgtaacatttctatacaaattttgaaatcattacgatagtaaattcctgattcgaattttttccccgctgagcgaagtgaggcgggtgttctcacgcgctcggcttaaccgtgttcatagagccccacttgcggggctccgcttggcttgtcagatacataattactgccgcatctcggaattcctaactatggggaaccgtacccgcttttattagtggcctggactctttgtatagggtattcgacatcatggattggctgaaacgcgttccggccaatcatattcaccgactcttttgcgcactaaacgcactattagtgcgccgtgtgtgttccacacaatctgccatcaggcagcctactctattatagcacctccacgacgttcgacgcctgcgtacttatctactctagcagacagcccagacctggagtatgcgggcaaagctcatcatgcacacgagcaccatgaaaggcgggttctattcaagacctaaggctttatatattatatttttaaaagtttttatgttattttaaaataacctattaaaaaagggaaaatcccaaattacgtccgtaattttgaactatttccaaaaagcatccgtcaggcgtatttaacggtagggtccaccactacatgtaataaagtaactcaaccagcacaacactcacacattctttttagcttaaggggctcgaggagatggtagtcctcgagcatcgaaacgcattcactactgtaccgtggcggcgtgtcgggcccgcgcctgacatgctcggtgagaatgtacacagtacgatattgtgcgcaagatacattttgtatgcatgatacaaaggtgtacttggtacaattcagccacgagcagtggactatgtaatagagccatccaccccgaattggaattacgtttacagttctccacgtgctgctcacgcatacacagtaggttaacgagaggtttgcctggtgataccatgatttggtctccggtgtgctgtacgagaagcaaccaccgatatgtatgcgtgtgctgaatatcacttgattggccaacctattgcaaggtgatgggtgtcatgctaagcatgatctcgtgtgaggacacttttctaggtaattaatacatgaaatacccgcgtcagtgtattacatgtaatactgtagcgaccattttggttttgcctgcacaaggagctcatcctttgatcgatgtgcactaagctcgcatcttgttcatcccttttacacttagcgaaggggacacatacatctctttcgttttaaaagctaaggtacgtttggtctagggtttctattgtggtgaatactgttctcggtggatgctttttggaattagttcaaaattacggacgtaatttgggattccccctatttcttattttaaaatatcggacccaaaacacaatccccccccaaaaaaaataaaaataaaagcttaggatcgttgaaacgctatttcttgctacagtatgcggtgagcaaggtgaacgcaataattttatgtgccatatctggctatgtgatccagaatcttctaggacatcgattcggttttgtcgcctattaactcgggtttcggaggagaatagggacacacagactgtgcgagagacacagtttgcgggttagccctgagcgtagatgtatctcccgatgagcgtgccgcaattccatacagtcaacgtatcaatgtgctctgagagctagtgatgtggttgggatcatgtcttatacgattaatgtattgtgcctttcacttattctgccgtgactagggcttcgcgaaggctgggataggattggttaactcacctttgatcgccattgataaactcaatccgcacgctgcacgggcatctcctgcgcctgcttcgcagccgcagaatctgcccgacaatgtatcgtcactatggtcacgacgtacaaccggatttcagagcaaaatcaatgacgaatctaactcgacgaatttgcaaatgaacaggcgaaaacagagcgattggcggcttcctacccgccaatccatgccattctgctcgtatctccgtcgattggctctcaaatgctgatcacgggatttaggggaagcgcttacaatcttaggcagaattagcactaaataagcgttaatcgcccttttatgactccaattccgcctgaattaacagctcacacgccaaaatacgtaatacttgcagcgctaaactaactatttgcacgagcccgcttaacacagattatttactgtgctgtgctaggtcaaaagtcttttaaatccgttacgtcattctacatggggataaatacttcttcggatagccctgcgtgtgctctaactgataagcaattgcactcgggaggaagagcattattaaacgcagagcatgctatgaagtgcaaccactcgactgaaaatgcatgtcatcaggtcgattctaaaaatagcgctcatgcgacccttcaacaactgagcttcagtatcaacaatggacagctgagtggtggtctcatgggttggagaataggaatgctactactacctaaactagcagcgaccagagcgtgaaaacgagctaggacatatttagatgcttccgagggcatcgtcaaagtttcgggtggtttgagccatttacggatttaattttgatgaaaccagcaattgaagtgacctaccagtaaataatctgtgttaaaactcatacgtgaaggatttctttgcgacgagctctgcggcttccttctcagcattcgggtccagaacagcgacgtactcgctcttgatggccgacggagactgatcgagtcccagatccttgccgcgcttgcctttgcgagaggatcctaaaagtcgccgactgccaaccttattagaaccgccaaacaatggagccggcggtccttgctgctgctgcgcctggggtttctgtcctagaggctgcttctccggtgaatttgggactggctgcgtgaagctctgttgcctgttttgccacgactttgacggttggtcctgtccagctccgccaatgacatgaacagtgtagttttcatcctgcttctgcggttgctggggatgctgtcggttctcttgaggctgatactgctgctccggttggtggtacgcgtgctgaggctgttgagctggcgacgactgctgctgcagcgaaggcttgtcgtggatgatgaacgagttaccgttctcgtcgtactcgacctccgtcagatgcttcatgtccatgacgaagcggcccacatcagcaacgcagaagaggatggagacgccgagcgacggccccgtcttgacgaccatgtcggggtcccagatgaggaacacgaaggcgtagatccacgtcaggatcttgcagcgcagcatgttgcgctcgaagttctcgggcgacgggaagatggtgcttgagatcttgggcccgtagaccagcaccgtcgagaagagcagcggcacccacgccagcgtgtagagcgtctgcagctcctgctccgcctgcacagtctcgtcggggcactggaagaaggacgccacaagcgacgccgacaggtagaactcgagcccgcacaccagcatggccttgagcgagttctcgtacagctcgcccaggcccttgagcggctggtccaccagctcccgcaccgccgccatctcgccagtctaaaaactgaagtttgcctacgaaaagagacaaccggctctcgagtgcaacagcgctctgactagttgtaccatatcgatggtacattctctcctccacaccacatttacacaacgcgtcaacctgcatcagacaaagacgaagatttggctcggaagaagacgcacctgacgagcatggagtggggcccgctgcagccgatcctggggctgctgacgcccgagcagggcctgaacgacggcgtggaggaccgcaagcaggcggacgccacgctggcgcaggcgctcacgggcgaggagctcacggcggccgtgcgcgcggcctccatcgcgcagctggacgcggcgctggggcacgaggcgctggcggtcgagcggctgcctctgagcgtcctcatgctgctgtgaggcgtcgctatgacacctgagagggtccaaactatggcaaaagctgacgaattgtgctgtgtgcatcactgatgacaggtccgccaaggccaacaaggtggagcacgcgcgccacgccgacgacctggcggacgcgcgcgcgtcgctgctgctgcagatctcgcgcctgttccaccaggtgcccgtggccgtggccgccaaggagatgaagagggtctgcgcgctcggcgaccagtacgcgcgcctggccgtggactcgcagcagagcgtcaagacggtcttcccgctcaagagcttcctgcgccgcttccaccagcagggccacgccgtgctcacgccgctgcacgcgcagtttttctatttatgcctgcactccaagtgctactttgccgccatggagatcctcgaccagtgcgtggcaatgatcgttgcaattatctgctgatctttttgataaatgctgattattttttatgttttatgtttttattggcaggacgttggtggagatccattcgcagtcgcatctgatgaacagcgtggacttcctgggctacgcgtactacggagggctgttgtatctcggagagaagcggtaccaggaggcgctggacttcttccagctcgccatcacggctccggcgctttcgctcagtgccttcgtcattgaggcgtacaagaagctgatcctggtcacgctcatcctgcgtggagagcccgtgatgctgcccaagtacgcgccgttcgttgtcacacgtcacgttgagaaccactgcacgccgtacacggatttggcgactgcctttgtggtggagaaggagttggcagcggtgcaggaggtcgtcaccaagcatgaagagctgtttacccaggagggcaactttggtctcgtgaagcaggtagtggaggctttcaagcagcggaagctgctgcggctcacgcgcacctacgcgaccatcgaactgacggagatcgctgcgacggcgggtatggctaacagcgacgctgtggctgctgagaagatgctcctgacgctgatctccaatggccagatggatgccgtgatcgataagcagaaggcgatggtgcgcttcgtccttgaggacgaggatggaggcgcctaccaggacgaaaagcagggcgaagcaacaaggaagctgcaggaggagatggagaagctcgtgatggtagcgtcgcagctgcgctacatggacgtagagctcgtgaccagtgccaagttccagtctcgcatgcagaaggataaggaccgacgctcgaggattaacctgcacaaccagcaaggcgacgagcggatgatcatcgacggcgccagtggcatggacaccatggagtaaggaagtctaccggataaaagttaatcgcaaggagtcgtgagtgactgcgcaacaatgaactggcaatgcaagacacttacgaacacttctattgtctaggatttctactgcatgacaagggccagctgaatcttgcgttggcgcaccagagacacagggttcttcatgcggatcacgcggcacaaggctgggttgccagcattgaaaacgcggtagatgctgtacgtggagccgtggatggccgcctggtccagctcgttcatgctgatctcgaacactcccttctccatcgtgcgcgtggacttgacctcgatgtactcgaccacctttccagccgacgacaccgtgagatcgtacggcagaccagactcttccttctcgttcacccactcaaccgtcagactcgactcgctctcagcgtgctgctgcttcaactggttgaagacgtactcctcgccccagcgaccgatagcttcgcgctcctccttggtcatcgtgttcggcacggacaaggactgcattgaagaaccagccaatggaggaggaagtggcggatggaacggagctccctcgatcggctgcggtgggagtggcggatacggaggtctctgatagtgtgctccgtttccatgcgtgtcggaaggcggcagtggtgcgaattgagggtcttgaggtgcagcatagttcggttgaactggaggatatggcttcttcatcggcgcttcctctgcagcaatctctccatcttccatgtcctcggagtcacgcttccgtccagcattgtccagcccgggtgtggcggtgtcctccacctgctccacccacagcttaccagcctcgctggtgggtagtggaggcaattgctgggtttcgacaagccactgctctctcatctgcggactgggctgcaacagactcaagtacatcaggttcgccacgctggcagccacctgcgctccaaacagcttgcgagatatttccatcagcaccggggagagcgcgcttgcttcttcgtctccagtcacagattgcaagtacaaggtggagttcgacacatcgaggaagcactgcgacgacgcgtcgactccgcgacgaaggctgaaggaagtgccgacccgatacaccacttggaagccgtcgtgtccatccaccagcaggcactgcagctccgacgccaactttgagattgtttcatgctggagctggtcgtacaaacttcggtgactgtggatcaggaatcgctgagccagagcaaacgccgcgcaaagcttctggtggaaggcgtcgctagccggacgctgcgtgctgaggacgctgacttcgtactgcatgtgcgccttcagcgacttcatcccgcaaacttccgttaggaacttcatcacgcgagtcgcctcactgctatcatcttcattcgaactctccacaaagtagctccacgggaacaaccccagcacttggagttgctcagtgtgtcctggttgctggaagtcgctcgcagagagatcggcttggtcgttaatgtacaggtcggcagctgaagcccatcggtggttgtcatcgattgtcgggaagatcacagagcgctgcaactgcgtgatgtcagaagatgaagccatcgacagcgcactcgaccagactctcactacggattgtagcagcttcagcagcttcttcctgcccttcttgttgtccagctgagaggatttcgtaaagcgagcgagcaccttacaccagacgctcgcttcggcttcgaggtgcgcggtcagcgtcgaaatcctggcgatactgagcagcgcgtccagatccccatcgtcttcaagctggaccaacttaatgtcgtctccatccttgcgtttcttggagctgctgctttcggatgaagcctccttcgcaatagccaccagcaacttctgcagcttcttctctttctccgttgtggcttggactggcgaatccttcgagctccagaacgcgacgccattgctggacccaccaacacttcgcactggcagccacggagttgacttcagcgtcttcttggtctccttgagttcggtcttggacagcgagcgcttcttcaccttcttggacaaagcggtgagcagaggcaacagcttcttcttccacgtcttcatgttgtcactatcgctgagcttcgtcgtcaaagagccttgcagctcagtgatcatctcgcacaagaaggcgactgacggcttccgctgtacgccacagacgtcggtgaagaactcgcacagggtcttcggatacagcgtctccagtacagtcagctccccgttgtgcgcggttgacgaccagactgcgctcttcacgccgataaatcgatgggatttgtcagtttcagccggaacaaagagcaaaagcttacgcgtaaacgccttggtgacctcggcacggcaggcgtcagagcgctggcactcctcccacaagaacgagtacatccggatcatctggtcgacctccagtgtagatgccagcgctgaatcaacggagagacttgagaggacgggcagcacatcgtccaccgtcggagtagctctcataccgaggactcgtttggtgaagtcatcgctcttccacgtcatggcactaaacgtcaccatagcacgcgtgaacaatcgcgtgacagcctccgctggtagccatatgtcagtggagcgatggaactgcccgtcagagtcttccagccagcagtatttcctccacatagtaacctcgtcttccttgtcgtcgaccgtggaggaatcatcgctttcatcatctgcagtgccccagtgtttatccaggtgctgagctagattcgtcgaaacactgcgcttaacgacgatatcctcttcagcctcgatccacttcagtaattgctccattccagcttgtgagcgggggtctgaagtgagacttgcagcatcaaacaacagcgacagcccgcagacgtccactagcagctgctgccactgtttgtccgctgagtccttggcagtatcagagaagtactcgcttgatacgatagcaggaccgttctggttggaggattccagtcgagtgacccaagagatcagctgcggcatctccttcaacgtagatggcagaatagcgagcaagttggggctgtcgactgcaacgatacgtcggctgctcgtcgcaacaaccacgttggccttcacttccgcttgcaacgagcaattgttgcacgacgccaagtgtgaggacaggaaccttccgtactcgatcactacactaacatccgcagcagcatcgataatgccgctcatatcttcagctgacaaacggagctctgccatctttggaaggatgtggtgtcgaatcaaatcgtggtcctccatcacgtgaatgcccacgtcgttcatcaagaacgctccaagctttgagctcttgttgattgtcttcgtaaaattgtcgtccagaatgcggaggtccccgtaaaactcgtacgatttctcgcgcgttgagctgccaccgttacccgacacgaagagcgagtcgtgagcttcagccaacgagacccacttggtcttgctgtccttgcccttgcgctgcagcgggaagcacttgatcaaccgcagctcttgccgcagcagcttcgagtggcggtccttacgccaaagcttcgccagcagcgccagaatcttcaccgtccagtcgatatcgtccttctcttctgacagcgacagcacccgcatcaagtgagacgagtggagctgctcgatccgcagttggctcttcatcaccgcagtcatagatcgtgacagcgaaggatgcaggaaacgcttgttgaacgtcgctgcgagaacgtcttcactcaaagcctccagcagcgaggtcgtactttcaatggcctcacttcccgtgagctcaatgcagtcaatcaactccgccggcatgagcaaccccgtcgatgctgaggaagcagaaagcagccacttcacttgacggagctcgcgcataacctccggtatgatgctacggaacggcgcctgtacctcgttttcaagaggcagcaacgagagcaagtgcgagatggcctcaatcgccttgtcagcttcttgaccgctagcttgagcactcgagacgtagctgcctaccgcggcacgcaccagcttggggaacttggacacgagccactcattccactcgcttccattggtgatggcctcgcgagagctcgggatctcaaagtctccttgcaagatgaagcggaagccgtacgaccgcagtggcaggtacgcgaacacctcctggagcggcggtctggactcctctccctggaatgtcagcgggaacgcaagcgcaatctccgtcgggtgactgcggccgaacaactgcgggggctcgagcttctccttgactaccagccagttctgctgcacgacttccacgctgctctcgctcttcttgacttgcgaatacagctccacaatctgagcgttcgtctgcaactgcttctccttcttgaggaagtgaagcgcgtgctgtcgagccgggtcacgcagtcgaagctcgcggattcggcggaggaacagcaacacggaaggctcaaacgccatgagcgactgcgagatgtcatccaccctctgcaccgatgagtcgttcaatggcagcacaaacgtcgtaccgcgacgctgcttccattgagtcgcatcgtccagccagtacggcaagatgtagcccatacccgaaccatgctcagcattcttggcgtggaagcagatgtggaagccgttcgagtgcacttgcgggttgtccgacaccttgaagacgctcttgaagccgatacctttcttgccgatgcttgcctccgagtcgacggcttccttggtagacgctccgacatcacaaatggcttggatgttggacggcgagaaaccccgttcgttgttgtagaagacgatctccttttcagcggtcaacgtgaagtcaccaagcggaaccacggcgtcgtcgtaggtgttgtcatcggcgttttgcagcaactcgagaacgaagtgggtgctctcgctatacagctcgtcgctaagacgcttgagcgcgcgctccagacgctgctgttgaatgcgcagcaccgaggtcgttgcctcgtcctggatctgcagcccaacgccgaactgcttcctgcgtagatcttcgatgaatgagcggcacgagtcatcgctggcgatatcctcaaccgaggacaggtcattggtgttctgaccggataattcgcttgaaaagttcgccaacgccacctcttgacttgaagcgttaaataagctcacagtcttgccgtcatctccagtggacgtaacaggctgaggcgtagcactggacttggtgttctccttcgctgcattgccaccgtcatcgtccgtactggaaagggacggagtatcacggagaatgcaccactgctccgactcagtcgcccacaagcccgacaagctccggctggaaacgtacaagagcgctttgcgctcggcatcgcttctgcaggccttccaaactcggtccgcgctagccgactccgatcctgttgtctgactgagcacgccaagcaaaagagacatcacgaagtctgcgaactcgactggtgtttcaagaagaacctccaggacgaagcgctccgggtagctgccggctgtcttgtccttggtgacgctggacaagtacgcgcgcagatgagcttggacgagctgcttggggaagttagcttggcccttgcacgtcaccaccatcgacaccaagtggactgccacttggcgggcggccgcatgggtcttggcttgctgcgctcgggcgaacagcagctccagatcggacggcgtcgatttctcgttcacacgcaagatcgttccgttcaagcaggacacaaacatgaagttgtttgaggaaggtgcatgatcaagaagaatcatttcatgcacgcggatgaacgagagcaacggcccacacagcggggcatagcgctctcgccagtccatatacaacgatgcatcaaccaagtacgggcacttgcgcagcttctccagcgcttgctccgtcaagagtttctgttgcactgactcacctgttgtctcgttcgatgagaccgtgtcatcaaagctgccgtcaccttggacgagatccaagctgccagcgaatttgaccaccgaagtctcttcgcccgcctgctctttgtcagcaagcttgatcaattcttccacactgggaagtccaaggtcttcaactcgagcacaccccagctccacgcagatgcggcgtgtaatccactgttgctgcttctcgctggataaagcagacagcgaagacgacgacgatatgacgtcgcgacactcgcgcacaaaaggcagcacttcctcctgcaggcgcttgtcactaaccggactcgatgaagtcgaggcatcgccgccttctccgcgggaacgcaatagatcaaggagccacttgcctgcgttcacttcatcgtcgtccatgctgtattcagcatcgtccacgagatctgggagaagctcaagcacggaccgccgtccagcccaggacacgctgttggatttgatcgacaacttgctggttagatggttctcaagtgacgacagaacctgaagaacctccttcgctgtccgaggctcgttgtcgcgtggcgcttgagcctccaagaagctctcgatctcggtcttcacttcttcaagtgtaaccttcggttctgcagcagttttagccagccgtctagcgaacgggtctgtaggcatgacagggaacttgttgatctccttgttatctgtctctgcttggccttctccttcttcttcttcctctttttcgtcgcttgacgcgacgtggcacttgcaagtgcaggaacacgagcaagtgtcttcacccacgcagcaacagtcgcactcttctttttcgctttccggcactttcttggcatcgtctgccccctctccgtctgcgtcttcatcgggaatcttgtcatcacttagcaacagcgcgtacgtcttggccatgatgctgcagatgacccacgtcacgaccttgagtctcgaatggtgcttgctcttctgcgaccacacaaggaaccgcgtgagctggttgcgcagcttcgagtccgtctcggcgatctcctgggacgaaatgggtctgcggaacttctgctggttcttggcgtccgccgcagccttgcgacgcagcacgttgtccagatacacgtcgacgtccgtcacgcgcttgagcatgtccagcgacagcgactgcatgctgttcttcttgccgccgcgtctcttctgagccccttcctcgctctcttgctgcgttgactgggcggcgttggtctgcgccagcagctcctcgagggcctgcttcctgttatcgtcactgaacttctccttggtaaggcggaacatcttctccgccacttcgcgctggaactgctgctccagcgtcttcatctccttcatctcattgttggccacacggcgcagcatgccgacgtacacgccgaacccggacgggtctatcgccacgcccatggcctgcgcgctcggctggcggtactgctgcgccaggtactgcaggaactcgttcagatcaatgtgcgacgacgcgcggaaggcgtcgtggcccagcatgtcctcgaactgcttcaagctggccagcacgtccctggtcgtgacggtcagcagcgccacgggcgagcggtagagctgctgcaccgcctccgtgtgcaggaacgagttgcccagcttgagctcgtggaaggcgcgcagcccctcgtgctgtaaaaatgcctgctggcactcgaacagcgtgttgatgcggcggctctgcatgaagcacgtcacgaacgtccacacgcgctggttcaccgtgtgcagctgcctcaacgccggcagctgcagcgcgctcgtgcccatgagctcctcgaacgcattgacgcctgcagaataacaacaacaacgtcaataatctccggcttttagcagcgttttgcagctaattcgacgcacggaagtggctgcagatggcgcgcacaaggacgtcgagcgtcagcgcgttgggcggcgccgagggactcgactggttggctcggaaggcctcgacgaaggccacgacgtctcgctgcacttgggacgcattggcgttcgcccgcggctgctgctggtagctgggcgggctttgttgctgctggtagaagctctgcggactctgctggcggctgtactggggctgcggcgcgtagccgggagcgcctcgaggcgcgcgctgttgttgctggaagcgaccccaattgctgcgtccgccgcgacctcccggggactgccgcatggctctggaggctctggaagcgctggagacgacgccgtcaccttgacaccgaatcggtgtcaccgatgttgcactggttggtgagcgggtccgagcccaatattgcgtgttttgggtatgtggaatatggtattttgggtttcaattgttttgtggtgattcaaaagtgcatacagtgacacctctataaatgacacctagttcgctcggtctaatacgctgtttcagttaaagaattgatcagataaagaaatggctacacttctaatggctacattttcatatattcggtgcacagtacaagggctttctttacctggtacccctccagcattttcgtactcttgttttgtttcgtcttcacactgacagaactaacagtaggcgcggtattgtctgttcctactccctcttctcattggtattagcagaatcgcatccccccaggttgtacgtgagtttcaatacagtgaggttatgggaatatttgttgtcccgatatcctgccaccatgcctgcagttttatcttttgcttggtatctactgcatagccccgagttgtctcgacatcataatattttagtttttcgtaatatatatatgtacgctgcgctgattgtaaaatactgtggctagcttatttatcagtatttagttactgcaaactcttcgttccaacttagcatccaaaataaaatttctctcttcgctcgatttgttgtggcgggagtagtggtagcaatggcatacgtgggaggaggcaggcaagtgattgagaaaaaaatatatgagtttggatctattactacggcgtccatttagagggttgaggcgccaataatggcgaccatttagagaataaagaggtttttgatcagttatagaacacctatagtgaaatccatataatcccgtttgcagtcgaggaatcctaaccagatagggaacacatagtcagttagaggggttcattggggacccgggtggtggacccggggggtctcgcagttcgaagctagcttgtacggatgcgcttacagggaaacgatgtattcgggcatcccctgcgcctgcttcgcggccgcagcatctgcatctactactgtacagccaagtgtaccaagtttgattgcttcttttcaaaggcattgccagatctctccaacgaattggtacttcaactcttgggtttgacaaacccaccgtggtgattctaccttctccagctcgttggattaggactccacggatttagttttaactttagttattttgtagttagtagaacggttatcaacaactagctaatcagcgtaattttagtccttcctgcctttgaaacgtgctctgatgcccaggcagaatcctatatttcttagattgcatggtgtgctcggaaacttacaggcggcggaaaaaacagaaaaaatatgtgcattcgaacatgtagcgcttccaggctaactgcccaaccgagcttgcagggtaacccgatgaagccagcaatttgcttcaagtttgataagttaagactgaggtctagcagatctcgatcgcgtgtaggagttggatacaccgggtgtttgtccttcgcgttgacgatgtccgcccggacttcttctctcacaggaatccggggcgtacagaaaacgtaggagcattcaaactctgtttgataaaacatggcgcagccgcacacagactttgtccggatcgcctgaatatctaacaacaacaagaactcccatcttcgattcgtccaagtgtgttattaccatttatctagtattaaactgaacgtgccgcattcatgtagcattaagatgatctgaactaatattggtagcaatgtactttgaagttgttttaacaagaacaggataaagtagaagattattctacagtagtaaatgggctcggtggatctctgcgggtcgcaatgtagttaaggcaagcttaatcatccaaagtcttcgtagataaaatgcctaagcgagtgtcgatttttaatggccccacacgagccattcatatctcgattgatttgaactatacttctcccgattcatacacggtcgtcattctttttgctgtagctgttagccttttctccggagaatacataacaccaggtgcagctcttttgagtctccgctgaatgaattcgttcgccaccgtataggacgtcaccgcattgccggcggatagatttggctttggataaaaatatgttgaatgaaaaaaaatcaagctatacttcccatcttggatcgcataaccttaaaaacgttaagtagtctatgcgaagttttagtggaatgttttatctaatccatccagacacattccaatgagtatggggattcacacaatatcagcctgccgacaatttaagtcacggcaaactcaggtgaccaaaagattttcaataaatctctatgcatgcagaagaaaatctgtgtctgaaagaggagggtataagttatgacccaggactgaacagattgaatcgatagctttaacactaatgaaatgagtgagtagtatgttgagtgctctggagccgcatgcagtttaatacgatgcggtgatgtggtaatgacaccagttgtgctcaaggtcagcatcgaggtttgtaattgtcacagacgccattactacgacgaacaacgtacatgtgcataacgttatctgtgcaatagcaagaattgcattctttcgaacaataaaatgtttgtgctggagctccactcctctggtggcgcctggcatcaatctagaaggaaaagaagctccgaggcgaatacgcatctatcaaaagctgtaagtgtaattcagaccagattctattgagtgctgtatgatgttgtgtgaatgttgtttgatgtcatccgcacgggggtgaagtgacgaatgtagcgtgaatgtcgctcgatgtcatccaaaaaccttccccaatcgacagttcttcgaacagcgaatttagggaggtgtcactgtagcacgactaaatttgtctgcattccaaaaatagtccggtgtcttaaatttgatcggaccagaggcgagatcctaaaaaagtctttaaaaaatggtctaaactttatatttcaaagatgttcaaatttggaatttccagattaaactgcgatgaagacattaaaaaatgctttccgcaaaaacgccactctgcactctgccatcggatgcaccttgtcagcctcgtctctgacgggaaataaaaatctcgtggcgctgggcgcgttcttcccaacacggcaaaccatgatcgggtcgattactcagcaacgcatcgactggatgaaaaggccatcgtctcaccactcaattggctgaaaaagatcgcatacaaatcccaagtgcgccgatccgcactgcttggtggatatgtttcacttgcgaacttcgcctctgccctcgccctctcagctccatgctgcgccgcgccctgtggacgcgcgggactcgcttgctccagcaccagacgcgcggcctgcaccgctcgcccgccgccatggcgcgcatcctgtgcagcgaccccattgaccccgtgtgcccggagctgatgcgcgccgcgggccacgacgtcacgtgcggcgccgcgccgctgacgcactccgagctggtggcgcaggtggccgactacgacgtgctcatcgtgcgctcgggatcgcgcgtggaccgcgccgtgctggacgccgcgcagcagctgcagctcatcggacgcgccggcacgggcgtggacaacatcgacatggtgaacgccaccaagcagggcgtgctggtcatgaacacgcccttcggcaacacgctctcggccgcggagctcacgctgggactcatctcggccgtgtcgcggctgggccaggccgccggcggcgagccggccgtgcgcaactcgcagatccacggcaagacgctgggcgtcgtgggcctcggccgcatcggccgcgaggtggccacgcgctgcaacgccttcggcatgaacgtcatcggctacgacccgatcctgtccaacgccagcgccaaggcgcacgacatcgagcccgtgtcgctggacgagctcttctcgcgcagcgactacatctcgctgcacgtgccgctcaacgccaacaccaagcacctggtcaacgcgcagcgcctggcgctctgcaaggacggagtcaagctcgtgaacggcgcgcgcgccgggctcatcgaccacgaggcgctgctgggcgccattgagagcggcaaggtggccggcatggccttcgacatcaacgcgccgtccccgccgtccgacacctggaagaagctcgtgagccacgacaacgtgatcgtaacgccccacatcggcgcgctcaccacggacgcacagcagaaggtggcgcgcgacctggcctacaaggtgagcgatgcgctggcgggcaagtcattcaagggcgtgctcaacgcgcccaacatcgacttcggcaagcgggaagagttcatgccgctgctgtcgctggccgagaagctcggcagcatgcaggcgcagctgctggacgacagccgcctcaagcgcgtgctcgtcatcgctgagggccccaaggtcacgtcgtctgagttgtcgggccagctggtcaagggcgtgctcaagggtctgctgtcacacatgctggaggaggaggtgacgtttacaaacgccaagcagctcgcggacgtcatgggtatccagacggtggagcacaagcacgatgaggcctctggcagcagcttctcggaccagctcaccgttattttcgagaaggagaacggtacgtccaagaagatcacgggtaccgtgttcggcaagaaccagctgcgtctcgtgtcctttgatgatctccccatggacgccatcccgagcggctccatgctgctgtttaacaacacggaccagcctggtgttctccacaaggtgacgtcggtgctggcgaatcacaagatcaacattggctgcttcggtctcgcgcgtgaagagactggtgccgctgccgtcagcgtgctgaatgtggacgaggccatcccggacgaggtgatggatgagctggaggccctgggaaacctcacgaacctgcgtcgcgtgaacttgctggagctcaacaccgccgtctcgggcggaatctgggataagttcctcaagcccaacgccagtgctcctgaagagcacgctgaggccgacgaggctggagtagagatcgtgcgccacccgaagccgcgcgtcaagcctgcgtcgccaaactttggctcgggcccgtgcaagaagcgccccggatattctctggctcagatccctgacatcgtgctgggccgtagccaccgctcgaagctgggcaagggtctgctggaggaggcgatcgtgcgtaccaagaagatcctgaagcttcctgaggactaccacctcggcatcgtgccggcttccgacactggcgcgttcgagatggccatgtggtcgatgctgggcgagcgccccgtggacgtgtgctactgggagtcgttcggcaagcagtggttcaaggacgtcacgacggagcttaaacttgagaatgtgcgagagttcgatgcgccgttcggccagatcccggacttctcgcaggtcaactgcgaccacgacgtgctattcacttggaacggtactactagcggcgtgcgcgtcccgaacgccgactggatcccggatgaccgcaagggtctgatcttcaatgacgcgacgtcggctgcgttcgccatggagatgccgtggagcaaaatcgatgtgtgcacgtttagctggcagaaggtgctcggcggtgaaggtggccacggtgtcctgatcctgagcccgcgtgctgtggagcgcctggagtcgttcgtgccggagaaccgtccgatgcccaagatcttccgcctgaccaacgccacgacgggcaaattcctcaagggcatcttcgagggcagcaccatcaacacgccgtccatgctctgcgtggaggactacctcgacgccctgcgctggaccgagagcgtgggcggccaggacggcctcatcgccatctcgcaacgcaacctcaaggtcgtggaggacttcgcggccgagaactcgcgctggttcaagttcctcgcggcggacaaggccatccgctccaacacgtccgtgtgtctgctgatcgacggcctgagcaaggacgaggtcaagcagatgcaggcgctgctcgagcgcgagcaggtggcgtacgacatcggctcgtaccgggacgcgccccctggcctgcggatctggtgcggcgccacggtggagaccaaggacctggaggcgctgctgccctggatcaagtgggcgtacctcgaggtcaagagcgcgcgcgacagcaccaaggccgagtagacagacgctgaagcattgccagccacacgctgagccacagcacaggttccccaggcttcgcttgtatgttgccaataaactaaaccgttgcagatcctgcaccacacaactcaactcaacttgccttcaactggtacagtagccatgtatcggaacgctaaagaacagtagagtagaaacgcagcgcgtgtccatgcggccgaacaacccaagcatgctcggatcgaccagtcctcaatagtatgtcgcggcgtgagaagcagccaagtcgagccgacgctgagcctcgcaccacccggcagaaggttcggcgtgcagctgcaggtaggcaggcagcggcaatacatgcaatagtgtcgcgctcgagaggacctcaagtcctgtgcctgtgctgaccagcggtatcttgacaggcgacggtgcacgcggcgatgatgaccagggcctcgggaacccgtcggcgcgagatggggagagcccccagccagcagctgaagacagcgccatgaactacgacgcgcaggtgcagccgcgccgcatgagcacacgctcggcccaggcgcgggccgctgctggccctggcacgaccacgcgcagtaggctgcagattgatgcgcggtctgggcccgaacgctttaatggcgagcagatgccgctgggaagtacacaagcgctacagtaccagcgacgataccagagcgaggcgagcggattccccgctcggagcgaacaggagtggcaggacgttgatccgcagtctccggcgttcacgcgcgtattgcaaggcaccacgccgcgtaacgtggaggaggacaagacggacacgagtcgagatccgtccacagacaacggagactcgagtgggaataactcgcttgagccgcagcaatggagcgaggcggtacgttacggtccgtacttggtagtcactgctgagcagcgctcatgtttggttgttctcactgcatgcagcaggaagggaacaaccgtccgtcgtctgctggagatctcggcagggagaaccaaggcgacgtccagtgccgcgtgagctggtgtgaacacgtaggccagcgctacggactgtgctgggcccacggcggcggtacgtcctgcttggtcgttgtttgcagattgctttggacggagaaatggtctgacgtgctctgcgttgtgcccgcgactgtcctcctcagtcaagaagtgctgccaccgcaactgccccaagatcgcgcttgccacgggcgagttctgctccctccacgagcgcgaggtcagcgccaactcgttctaaatccccacgcgtaaggtaatctccgagtcctcgcgaaatggacgcttctgctcctccaccagcaagcacccccatattgttcttcttccagagctgctggaggacactttctcaagtcgtgctaggtataaatcactgcagatatgtaactgtgagtaagcacttgaagctgcgacacattgccacgacgtgatcaaaagcgcagccacttcaagtgtcaagtggcccacttgacgtctccaaagcgtccatgaatccgttactaaaataccgtttccgcggtacccaaaatactacaattttaggcaacaagtttctcgttgcagaatccgcttgtcagacaaaagatgaaatgccggtaagggcctcactcacggaccatctcaccaggtactgtacagtataagttccatctgcattaggacaaggcactgcgggttatggaacggtgacggtttgtggcgaacgtgtgccatgttatcaagtgcatgctgaaggccttactttctcgtggtgggttttgagcgatataccgaggcagtaaaccgtgaagcagttgcgatcaagatgctgctttcgagaacgcgtggtctgataatttgtgattggtaatcttacttcgtgcatgtagttggtgccacctcagcttgaactttgtgtgtttgtgctggaatcgagagataagacccaaaagttgcgacaaaatgcactaaatactataccgccctccccacgtcctggtcgctgatttgagttgcggaacgattgctcgatgcatctggctatgtgtggactcttatgaggacgagagtgtaacccgccctaacacagtgccaacaccgtctcggtccatttgccaataagtgcgacagcagcagtcaacgattccagccaacgcttgaggcgaaactattcaagccttttcaagccaccatggtgaaggcggatcagtcagggctccaccgcttttggagcatgtacgtggactcttcgtgctctggggcgccgacgggtgtcttcgtgcaacggctgaacgactgtgtgaagcaagtcgccgccgacggtgacaactgcgccgccaagtacgatgataaccagaacgtcgttggttacgtgaaccaaagctgtcatgacggccgtcttgggggcctcgagtctgtcttcggtagcacgccgttcatgtcgtacgactactacaacaacgacgactgcaccgacttcgagaactcggcttcgtaccgggccaacgacaagtgcaacagtttgtacgacggggattcgccattccgaagcgcgacgcttacgttcacgagtgaaggactagagtggagacgcaacatgggtaaagtgggcactgctctcaactgcccaggctcgagcggccccgggttctaccagtttgacgttcccgatgcaaatatcaacaccgacttctgcatgaacaagttcgacggcatttcaggcggattcatattttacaattcgtcctccaccatcaccacgacgtcgtcctcgtcctcgtcctccggctcagataccgggaattcgagctcgtctgcgtcgccaacaaccacccctccaagctcagacaatgcggtcgcaagctcaggatcttcgtcatcacccacgactacgactactacatcaggaggcggcactggtgccggtgccatcgctggcattgctgttggcggtgctgctgttctggcgctaatcgcggtgccattcatcatgttgaagcgcaataggaagagcgagagttccgacttaaactcgctgcgagacccgtttattggaagaggaagcgcctggaccgcgggtcccacacgtgattcggatccttccttgatgggccctggactttggaacgacgataccattgtcgctacccgtgttccccgtgaccaagtgaaatttgaagcggttctctctcgtggtggctttggagaagtctaccgagggacatacaacaacgagcaagtggccatcaagatgttgttccccgaaatgcgcaaggatctgaagaaggtcaacgctttcctcgccgaggccaagctcatggcgagtttggtgcacccccacgttgttcggtttgtcggcgtggcgtggggcaacctggccgacttgtgcgtgctcacagagctgatgcagggcggagatctgaggacgctactgaaagactttaatgctaagggccacccccaaggcatggaccaggacaaactccgcatcgcataccacatcgctcaagcattgacgtacatgcactcgctctctcctgtcgtcatccaccgagacttgaagtccaagaacgtgttgttgaccgaagacttggaggcgaaactgacggactttggcgcgtcacgcgagcgccaagagcacaccatgacggcgggagtcggtactatgctgtggatggcgcccgaggtgatgatggccgagcgctacaccgagaaggccgacgtgttctcgttcggcgtgctgctgtccgagttggacttgcagacgttgccgtactctcatgcgcggatcgactcgagcggcatgaaggtgcctgatgcgttgattttgcagaaggtggcgtcaggtgcgttgcaagtgcagttttcgtcgaagtgcttggctgcggtggtggagttgggcaaggattgcgttgcgctggacccgtcgactcgtccgtcggcgccgatggtggtgttccgactgcaatcaatcacgaaggagttgagcataacatttttggcaagtgacttcgatgcagaactgaccccacagacggcaaagttgtagttaattcattttaaaagtaggacttttttgtggttgttatcaccaagaaaccttgataccatacacacgtggtagccatcgtgtgctcaactgtatcttacaaacattggtgatcaccaccccagcttcgcaatgatgtcgtccccgtaaaaaaattagacaacctcggattactttaaccctttcgtaatgagacatctcaaaattacccctagcttgcctacttagtacattttcctgggtttataggaacttttccgttaccagccccatgaaaccaagcaaaactctaccaggtgtgctggtacaacatggtgcgctcaatccatctctcggtcaattcagacgtaggcgaatccgcctcggcgactgttgatctgttggggaaggtctgtccgccatagagatctcctcgtagtcccagctcctcgacatccgccaacgaagttttagatggtcacccaaaaacagcgaacaagacctatcctacggcagaagcacctcaatattctatgccactgccctccacgtactgatccgtaatagttgtcgtccaacagtcaagttattgttgcgctgttgctaacagagcaacagcggtaataactttaatcaatatatctgaccttgggatctgatgacactgtcccacttgcgatctggaggacgagaatgcccacgtcaaccagtcttaatcccacattctccaaaccaccggacctatcaaagtcaagggcatcgcaagcttccaacctctcctacaacaacttgtccgaaacatgccggacacctaccgcttttggagtatatacgaagactcgtcttgtgaaggagcaccaactggcgtcttcatgcagaggcggaatgactgtgcgggccaggtcgcctccagtggctctcattgcgctgcaaagtacgacagcagcaacgccgtgatcggctacgtggatgaaacttgccacgaaggccgtgctgccggcctcgacactctcttcggcagtgttccctacatggcggccgactactacttcgacaccagttgcacagactacgaaaatacggcagcgtaccgagccagtggcgagtgcgagacgctgtatgacggctactccccagtcagaagcgcaacaatttctgtgacaggggaaggcctgctctggaagcggaatatgggctccatcgacacttccctgaactgtcctggcgtgggtgcacccggctactacgagttcgacgttcctgcagccgatatcaacgcaaactcctgcatgaacaagtgggatggcattgacggtggctttattttctacaatatgtccaccgtactgtcgtctagcggctccggcgcaggaaattcaagctctgctacgacgccgactaccgcagacaacgcaatcgtcagctccggatccggatcgccatcgacgactacgacgtctccatctaggggcggtatcggtgtcggtgccatcgctggcattgctgttggcggtgctgctgttctggcgctcatcgctgtggcgtttgtggtggtgaagcgcaagctcaagagtgacagttcagacacgaactcgctgcgcgacccgtttattggaagaggaagcgcctggactgggggcccaactggtgactctgagccttcgtcgatgggtcctggactttggaacgacgataccattgtcgctacccgtgttccccgtgaccaagtgaaattcgaagcggttctctctcgtggcggctttggagaggtctaccgagggacatacaacaacgagcaagtggccatcaagatgttgttccccgaaatgcgcaaggatctgaagaaggtcaacgctttcctcgccgaggccaagctcatggcgagtttggtgcacccccacgttgttcggtttgtcggcgtggcgtggggcaacctggccgacttgtgcgtgctcacagagctgatgcagggcggagatctgaggacgctactgaaagactttaatgctaagggccacccccaaggcatggaccaggacaaactccgcatcgcataccacatcgctcaagcattgacgtacatgcactcgctctctcctgtcgtcatccaccgagacttgaagtccaagaacgtgttgttgaccgaagacttgaaggcgaaactgacggactttggcgcgtcacgcgagcgccaagagcacaccatgacggcgggagtcggtactatgctgtggatggcgcccgaggtgatgatggccgagcgctacaccgagaaggccgacgtgttctcgttcggcgtgctgctgtccgagttggacttgcagacgttgccgtactctcatgcgcggatcgactcgagcggcatgaaggtgcctgatgcgttgattttgcagaaggtggcgtcaggtgcgttgcaagtgcagttttcgtcgaagtgtttggctgcggtggtggagttgggcaaggattgcgtcgcgctggacccgtcggctcgtccgtcggcgccgatggtggtgttccgactgcaaacgattatcaaggggtctatagtagcccagaccgacacggctgaggacactgctgatattgatcggtcgatgtccaacatgtctgaggacactgccgacactgactacgtgatttaggagcggggcggcttgctttccgtgtcatttagcattgtatgtggcttgataaaagtgagtaaggccgttagtcagcaggttgaagtgatctgtgccaatattatggtaccaaacgcgtatctttgcatcgtaccttgtcgcgcaggtacagtacctgctaggatttgaaaatacacttctataatctatatagaatgtaaatcgatatagcatcactgtacaacgatgtatctatcccttctgtggcaacgtacaagttgatcccccgcggatgtcgacctgaccccaaccgtcgcagcggttgcccatcttatcgatttattggtgcttggtgccgcgattgctgtcggcgtcactccgatcattcccgcattcggcctcgagcgcgcaagttcctctctaaccactcctccttcccaacgccccgccacaatgctgcgtctctcgcgtatgagcctttgcgcggcccgcccgtccagcgccgtggcgcgcgccatgagcacgtccaagctgagcctggagcagctggcgcagcgccagagcctcaagggcgcgcgcgtgctggtgcgcgccgacctgaacgtgccgctcaagaagaaccagacgcccgccaccatcacggacgacacgcgcatccgcgccgtgctgcccacgctcaagctgctgcagggcgcgggcgcgcgcaccgtgctgtgctcgcacctgggccgtcccggcggtgaggccaaggacgagctgcgcctgacgcccgtggccgcgcgcctcggcgagttgctgggcagccccgtcaagaagctggacgactgcatcggcccccaggtggacgcgggcatcgacgcgttgcaggacggcgagatcgtgctgctggaaaacgtgcgcttctacaagcaggagacagagaacgaccccgagttcgccaagcagctggcccacagcgccgacatctacgtcaacgacgcgttcggcacggcccaccgcgcgcacgcgtccacggagggcgtgaccaactacgtcaagaccaacgtggccggcttcctcattgagaaggagctcaagtacctgtccggcgccgtggacgcgcccgtgcgcccgctcggcgccgtcatcggcggcgccaaggtgtccaccaagatccctgtgctcaagtcgctgctgcagaagtgcgacaagatcatgatcggtggcggcatgatcttcacgttctacaaggcgcagggcctggacgtgggcaagtccatcattgaggaggacaaggtcgagctcgccaaggagatcttggaggaggccaagcagcgcggcgtgcagatcgtgctccccacggacgtcgtggttgctgacaagttcgaggccgacgcgcagtcgaaggttgtgccggccaacgccatccctgcggactggctgggcctggacattggtcccgactcgcaggccacgttcgccaaggaactcaaggagtgcaagaccgttgtgtggaacggccccatgggtgtgttcgagttccctgagttcgccaagggcacgttcggcgtggccaaggctcttgcggagagcacggagagcggtgtcaccaccatcgtgggtggcggcgactcggtggccgccgtcgagcaggccggccttggctccaagatgagccacatctccacgggcggcggtgccagcctggagctgctcgagggcaaggtgctcccgggtgtcgccgctctaaatgacgcttagactagccacgagcttgaggctgctggcaatagacagctttgggcaatcaatcggtagtgctcgcgatagatgcagcagcttcgaagcggagacgacgacaaagagggcaagtaggccgcaacgcctcctgcgctcttgttgtaaatcaatgtgaatattgaattgtaacttcatctcgtgcgtggcaggcgcttgtccaggagagcgtccatcaccgaagtaacctttggacatgctgcaaactgggacaatgtgaagatcttcaacgaccggccaaataaactcgtctcattgattgggtggccacttcaacttgcgattgtcaaaaggcacgtcacctgtgaccgttatcaaagctgcgaccgttttcaagcgtaacgagctaacaatgattgacaagtggcgggccgatatccagcaacaacggaatgtgcccgtcgagcacccacaacgaccagacccagatgtcccccgcttcaaaagcagtctttcgcgctggtgctcgccccacattactcactgcgcattcgtggcagtggccactggcccgcgtaggtcagccgacgcccacgccaccgtcagttttgttcgcgcagtgtttcttcggcgtgggcctgaccactctagagagcatgggggcacgcttgcggttcctggcttcgtgcctttcacgccggccatacgagagctgccggtggcgcttggataaggcgatgcaggcacagcgttagtaattgagccttgagtaaccccgaatgagccggtgagtcaatggcggcggtgagtaatgttcacgcggcggcctcctgagcagcgctcttcgcgcgcgttggcggcaaagcacagcgcgacgacgatcgtgtaatctagaaccacggccggactacagtacacatgtacacatgcaccgaggcggtggcggcgtggccagcgcgagagaactggcgggtgtcggccccagggttgcttcgtgcgattgcggagcttgcgtgcgcgagaacacgcgagctccaggggaagtcacacgtcgcggccccggcactgtcgacgagcaccggctattagtcgaggagcctttccccatcttggtgccgctggccggcgatggctgatcggttcaagcaccgaccgagaagatcacagtcaaggcacagtcgagacgacgaagcgcggggcatatggacgtcggtcgctcaagctggggaaacgagtgggtctaacgaggacgcgttgccggtagctccgccgctgctgcagcagcagcctccgctccacaaacgagccactgaataagaagtctaggacagtaacatccacttgcagtgcaacgatggaggatcataaagacgagcaccttgacgcgttagtagcgccccatgtgttatgatcgaggtctccgccaaaccggatcggagccgcgccggcggatccatcaccagcttccagaaggctcctgtcgatagcagcggccgatgatctaatgctgcctcgttggtcaccgacaccgccttgagacggcatacatgtacatactgtatcatcatcctttcagacggagcaggccggatggtccgaccttgccggcttcaacaatcgtgcagtaaacaggcactttcgggccgagataagccggtaggtcggtcccggcgcggtggacgactgctctctgcggcacgacgtctcgatttgctccgcgctttggattccggcccggagcacgcacccagcggatatctgtgcgtgtatggtaccacccgcaccggtgccggccgactgcaaaccgcaggcagaaagccagcaacgagaagcagccaggcatgactgcacgaatcggacagagccgcgggggcggaagatgaaatgctgcagcgccggtcgcagtggcaaccaacttgtggctcaacgcggcagtcgagcggatcatgggctcgtttgcggacacgcacagggccgttgggctcagcaatcgatgtggtcaacagggcgcggacgattacagcgctgcaagcgctgcagctctcgccagttgcgcatacctgtgctgtgcatgtacttgccggcgtttgccatggagtcttcgccgtcgcgttcgcggcaggccagttgcatgtgccatggagtcgctatcgcgttcgcgacgggcctgtcctggggggcaccggggcggtccgtcgctgtgtcttcgaacgagggcggcactcgtcacagcaactgtgatgccttgcgtccagccagccagcgttcgtgcgctgcgctgcgtcgaccagatccagccaccattgcggcgcaatgggaaggcccgtcaggccggcgatcgatcggccggtcgccggccgcgtcaagtcgtgtccaggattcagcggccagctgacgcgccgagttcctcgcgtcttggcgcgaactctggactcgaagtagcaaacaactgagccggtagatatcggatcgaactcacgctacgctagacgctctcttcccgaaacagccgccgaccggccagcgcgcttgacggcggcgcggatcggcaaattcttagcacgccgacgacaccttcggccaccagccgaagcagcagaacccgctcaaaaagggcggcgcgcgccgcgacggctttctctgcaccggtgcacaaaaggccgcccccatggccgggccaggcccaaaggggggaccatccagccgcggtcgtgttcatttgagatttctcacaccccatctactcgtcccgcgtaacaccggagcgagagataccaccgctccagtagctcttccggcatcggaatcctactaccctcgcaccccccacgacccagcgtcgtacgttcctcccaagccccgctctcgcagcagcttcccacccccaactcgtcgctcgtcgcttgatgaacgcgagtacattcccttcatttattaccgaaccccaccaccacctccaccagcagcagcagcgcgccgccgccccgggctcgccgtccgcttcgtactgccctctgctccctcagatccagcacctgcactcgccgctaaccaagacgctggcacgccccggcggggagcccgccaagctgcagctgcccatggcgcacgctaacgctatggcgggcggccgcttcgactgctccacgtcgagcgacgacgatgagaacatggaccgcagcaacaccgcgcacctcggttccgtggcctcaccgctccgcagctcggacggcggggacggcgaagcggtcagcggcatcgccgccatgagcctcagctacatcatcaacggcgacgtggagacgcccgcgcaggtggacgacgacgacagcagcagcaccggcggcagctcgcgcggcggcttcgacctctcgtccatgctcaacacggtgtgcgccaagcccgactgctaccgcaccatccgcggcccggaaggcacgttctgcaagtaccacaagcagagccgcttctgtcgcgccgagggctgcgccaagagtgccaagaccggaggcttctgcatctcgcacggcggcggcaagcgctgcgcgcacccggactgcaccaagtcggccaagcagggcggtctctgcatctctcacggcggcggcaagcgatgcagcgaggccggctgcaccaagtcggcacttgtcggcggcttctgctcggcccacggtggcggccgcaagtgcaagatgcccgagtgcaccaagacggcgctcctgggaggactgtgcatcgcgcacggcgggggcaagcgctgtcaggtggaaggctgctccaagagcgcggtgggcggcacgctgtgcgtctcgcacggcggcggcaagcgctgccaggccgagggctgcaacaagggggcggtgcgcaacggcgtgtgcattcgccacggcgccaagcgcgaccacccgtcggtgtccccataagcacaacctaaaggcccccgtgggccaaggaggccggtcggtcgagcctccagcaggatgacggaatcgtaacgtggttgccatcggaagtggccgcaatacattttgttcactccaatcctatcttttacctacaccattccaactacagcgccaatctcgcaccgcattgtgttgcgaggtgctcaactagccgggcccgtcacgttttaggccggtggaagccttatacgtgacactcggctataaatccttgaaaaataaatcaacaaaatgaggagcgcgagttgctaccttagagcgcgaacctcgacctcttgtacaacagttcactcttgcggctaccaaatactagtatgcatggatatcggatgactcagacactcagcctcaaccaaaccgcttgatgcggacctggatctcttgccgacacagagggcaatgcgagaggaactcgccgcacttttggcatgtttcgtgcccgcactggaacaccgtgtccttcctgcgatcctcgcagatggggcacaacagcgtctcctgcagttgagcgagctccaactcagctcgcgacgtgcgatgctgcagcgtcgggcgagccgatccgctccgcgcatcgtctgcagaaccgatgagcggagctgatggtgatgtcgcttggccgtattgcgttgttgttgttgcagtggctgcagacacgacgcgcgcgggtgtatgttgaagattgggctggatgacgccgaagttgtggttttggtgaacgttctcaactggttgcggcggaggaaaaacgtcaacgcgcggcaagtccgtacggacgcgatacggcccgccttcgaggtaattcattgccttgatcgtccgatactggtcaggtatctccatcagggcctgcaacgcgaactgcgtctccttcatctgtgggtcgctgaattgtgaagtgatcttgtggtactccacgaactggaagttgtcaaatttcctgtggacgaggtagtcgtcgaagtatatcatcgactcccacgggccgtcgcccacgcccaccataacgatactcagagggaagttgctggcgtaggtgatggcgtcgatcgtctccttctcgttcgtgctgacagcatggggaggaatatccaccgagcgagtcacctgtccatctgcaataatgacgaggatatggtagtcccccgtgcgattgacaatgttcaccgcctcgttgatgatcggcgcgaagctcgtgggccccgccatgaccacgttgcgcaccacctctcggtagcgcgaccggatgctctccagggggaagccagcttgaccttcacgctcgccgaaggtaaacaccgcgcggtcgcacgtcaactcgtctccgaagccgtacacggggatgatgttgtcctcgtctgcacaggcacaagcaagcagccccgcaacgtcgtcgggcgtcagtgaagcagtcacatcgcgtccacaaactgtctagcaagacgcaccgaagtcgcgcagcgtccggccgatcgtctcgatcacgtcttcgtacgggtttcgagcgctcgggtcgtcgatctcgtgcagactgcggccgccgaacgtgcgcttgccgctccactcgttggacttggtgcctgccaacataattcacttcgtaagtaacaaacactacaaaacaatacggtaatattccagctgcagtacagtacagctacatatcacgcacagtcgatgccgatgatgaggttgcagctctcgaggccgctgcgcctcagcgcctgcgtcacttgcggcagcgacgtgaactggtcggggatcatctgcgtgagcgcgtccgagcgaccggcaatagggcgcgggcccgtctgggtcaccgactcgcgccgcgcctgcgactgccgccgctgctgcttgctcggcccgttgcccatggcgatagcggagcttttgctgctggcctggggaatctggaaatgggttgaagaagttcttcagaaaaatggagccaccaatttctcttggtttcagtaggtcgattgtgggtacattgtaccgacggagtggtacagtgcgcgctgtggatttctcggtggtcgaaccacttcaacttgggtatcctcgcaacagcgatgtgctgtgggaagttccccgctgggaagatactaagcttgtgcatcaatcctgctcgccgtgctcgcagtcgttgcgaggtttcacttcgaaatggtctcgacttctccagctctccaggcgttttgtcttacacaaagcttgctgcctcctcggggatggaaaaggaagtgggggtttcttcttggcagcatataacttttatgagtagcaagcagatatctggaaactgtttgccgtaccggcaaccttgagagtggcaagagcatgctacacttgcagggatggcaaggtacttgagacgagactaatgcgatgagtctacacatctttgtaaggctgttagcgctaaccaaggatggagactgctcagccagctttgcattaaccttgtaaggctccatcgacccgctaccaactgagtccatcggtgaacatgcagcacaccttcaggtttgatgccgccatgcgacgaatacgaaagctttcaacttcatcaacgcatccgcaaatgtagcaagcgacaatctcgaattgaaatattccgcgctcaaaacatctactgtccgtggtccttgctgcccaggtgccgatctaaatatgtgtacatgcagttgtctaccccagcgcaaagaatcattgacatgacttacagactcacagacttacagcaagttggctgggtcccgcgcgtgcgccaactgctgctgcgctgctgcatctgacttgtgctcgtgctggcggtagacctgctcctccgccgcttgctgctccctcagcagcttcttcttccggtggcgctccttgcgctctttccgctcgtcgaagacctcgatgcccacgagtccgagctcgcagaggccgatgacgatagcgctgcgcagcttggggcctgagtagagcgtcatcttgagcacggacttgagcacgacggcgtagaagacggccacgaccagcgaggccagcatgaggttgtacttgtagttgcgcgccttgcgcaggcgcttgatcttccagcagaagaggaacttggcgaagtagacgaggaaccacgcgaaggcgaagggcgtcgggtagaacacgtagatccactgcagcaggcgctcgttctcgtccagctggccctgcgtgtacttgctggccacgaagctcgcggcgtacgacgtgccggcgcccacgtcgaagaaggccacgaccacggcgaagatggcgaagaacgtgagcgacgcgtagagccaccggtagaaccgcttctggtgcacgaacccccagtagccgtccgacaccgtcagcatgttgcggatgcgccgccgcttccccatcgttgccgtcactgcctccctgcagctaacgtgtagggtcgaacaccaatgctaaactgtctcgtcctgtactagtagtcagcacgcgggacgctttcgtacttaatggaggctccgcgaaggctaaaaaaacaaaaactgtccaggataggtaaattcgcagttcgtcgattggggaaggtttttggatgacatcgaacgacattcgcgctacattcgtcacttcacccccgtgccgatgacatcaaacaacattcacacaacatcatacagcaatcggtctgaatgacacttacaggttttgatggatgcctattttttttttccttctactgtagattgatgccatcagaggaagtggggctccatctactactacgacgaacaacgtattgtgtattagcggactactacggtgaacaatgtattgtgtactagcaagcattgtattctttcgaaattcgatcaatatgaggcatcggtgctaataatgctaaccttggacacaactggtgtcgccacatcactgcatcgtattatactactgtacatgcagcttcaaagctctcaacatagtacttactcattccactagcggtaaaattatcgattcgatctgttatgagtcataacttataccctcctctttcagacacagattttcttctgcatgcatagtttctcagagagagatattgaaaatcgtgtggtcagctgagtttgccgtgacataaactgtcggcggctgatattgtatgaatccccacactcactggaattaatccggatggattagataaaacattccactaaaacattgcaaaaaactacttaaagtcctaggttgtgcgatacaagattaggaagtatagctcgattttttttcgttcaacaatttttttaatccgaacccaactctatccgccgtcaatgcggtgacgtcctatacggtgacgaacgaattcattcagcggagactccaaaagagctgcacctggtggtacgtcttctccgggaaaaaaggctaaaggctagctgcactagcttaggcatttatctatgaagactaggatgatttaagcttgtcttgtgtgagactacaatacgacccacagagatccaccgaactggtggtgtagaatgatctactacttgatcctgttcttgtcaaaaacaagttcaaaatacattgttaccgatattagttcagatcatcctaatgctacatgcatacagtaccttcagattaatacttgataaagggcaatatcacacttggacgaatcgaagctgacagttttttgttgttgttagatcttcaggcgacctggacaaaatatgtgtgcggctgcaccatgttttatcaaacagagtttgaatgctcctacgttgtcgctgtacgccgcgcatcctgtgcgagaggaagcaccgggcggacatcgtcaaagcgaaggacgaacacccggtgtatcctactcctacacgcgatcgaaatctgctagacctcagttttaactcatcaaacttggaacaaattgctggcttcatcgggttatcctgcaagtttggttgagcggttatcctggcagcgctaattattcgaatgcacttttttttcttgttttatcgtcacctgtaagtttccgagcacaacactgcaatctaaacaataaaggattctgcctgggcatcagcgcacatttcagtagcaggaaggaaggaaattacgttgattacctcgccgttgataaccgttctactaactacaaagaactaaagttaaaactgaatccgtggagccctcattcgacgagcaggaggaggtagaatcatcacggtgggtttgtcaaacccaatcgttgaagtaccaattcgctggagtgacgatacatgtatatgaactggcaatgcctttgaaaataagcgatcaaactttgtacacttagttgtaccgtggtagattaggcagatgctgcggttgcgaagcaggcgcaggggatgcccgagcacatcgtttccctgtaagggtatccgtacaagctagcttcgaactgcgaaaccacccgggtccccaattgacagttttttcttgttttttcagcaagctgctggactttcactaactttttacctcaaaccagcgcgggcaccatgccatggtcactaatacgcacaacctgctaaacatgagttcattgcgcattaaggatgatcgtgcagtataggattgctaattgagtgagcggctgaattacgaccgacagagagcacaatgatgatcgtttgatcctggggagtaggaaggcatagatcaaactgatcaacatttggccaagatgcagttgcacttcgtcgaaattgcaaaactcttctcactttgctcgatagcctccatctttcatcgactattcatcaccagtttgcacgagcgacattaatcctgtgatatcagcacctcgtatctcagtactgtacactgtactgaaattcattcacgaagtggtccacatacatcgtgtgacgtcacacagccggcgtatccacatcaacgacctccccatcctgtggccactattcaatccatcgcttcgccccaagatggctgaccgcgtgctcgaattgctggcgcccttgcaggcggcgctgtccgcgtcgcccctggccgtgaaggtctctgcggccgtgggctgcctggtgctgtctcgcctggcgctgcagctgctgggctcgctctacacgttcttcctgcgcccggccaagagcctcaagagcttcggccagtggggcgtggtcacgggcgccacggacggcatcggcaaggcgctggccatggagctggcgcgtaagggcatgaacgtcgtgctcatgagccgcacgcagagccgcctggaggaggcccgcagcgagatcctggccaagtaccccaaggtgcaggtggagatcctggccgtggacttcaaccgcgtagacgagcccagcgtgcgccaggcgctgcagcagaagctggaccaggtcaaggacgtcggcgtgctgttcaacaacgtgggcgtgtcgtacgacttccccgagttcttcgaccagctcccggaggaccgcgtggacagcctcatcaagctcaacgtgaccgcggccaccgtcatgaccaagctggtgctgcccggcatggcgctgcgcaagcgcggcgcgatcgtcaacgtgagctccggctcgggccgcatggtcgtgccgctgctcagcgagtacagcgccaccaagaagtacattgagcagttcacgatctgcctcgccgccgagtacagcgccaagaacgtgcacgtgcagtgccacgtgcccatgttcgtgtcgaccaagctggccaagatccgccacgcgagcttcatggtgccctcgcccgccacgtacgcgcgcgcgtcggtggcccacctgggctacgacacgctgctgtcgccctactggccgcacgcgctgcagatctggctgtacgagagcgcccccacctggctgctcagcaaggtgcgtagcgtgctagagagatggataaccgacgccggcctgcgtcgccagcaaccgcacgcgacgcaggtcgccggcggcaccgtcccagacggactaagcgacgactgacgaactttttgttatgcgattatgctgttttgttgctcgcagggcgccatgatgacccacctgtcgctgcgcaagcgcgcgctcaagaagctcgaggccaagaagaaccagtgagcgggtcgcaaccgaggcttgataagcgcgcaagcgggccgagagcggcttcatcgatctttgcgtgtcgacaatgcaggcagtagcgtagcactcgtgcagcaccagccacgtagcaaaggaaaccgccggcatttgtcaatgcaagataactgagcttggccatcgccctcgcgccatcgtatgtgtcgagtgccctccagagtcaccatttgtatgcgtctttggtgatgagcagcgggaggccccacgcggcgtgggccacgccctcgatgagggaatacacaatacagacccgcccgccgtaattccgtcgcctcgttcgcaccgagagtcgatgtccatgaccagcatgccgcgtggtgttgggtaaggcgatgcaaggcagattgccagcctccacccattccagtggcaatgggtggagcactgtcgccaggagcgacccacgcgggaccgcgatcgtcaccaactttgaaacggcggagtatccggctcatcttcgctagtctcgtaaataagcagcggtgccggtgcgccttacacagtcttggcgaaatgctcgtcttggatcgccttcaagcaaggcgcgctgcacgggcgccgagtctctgtcgacgccagcaagcgaaccccagaagagccggcccatcggagcggcggctcaagtgcgcgccaagagactctatgagagaggctcatttctgcataaaattcatcatcgattgagccggctcagcggcgtcgaggagttgcagagcgaaatacagagcgcgatacggcgtgaaaatgtaggcaaatattttgcaggcaatttgccgagctcggcagcaggaaaacaagaagtaggaaaagtttttttctctgagaaaaccttggagaaatcccgccgccaaggatcttggttgctgcgataatacagaacccagcactgctgttaccgtgatacctgtcagctgaccttggtattctcgctagtggatttcgcgtgccgttagcagcgctttgggccagctgcgagtaattttgccgccggacaagataggactgagagccgatcaccagacgcgtgctttcgtggcgagtaagcggcgccaggtgctgccgcacttgaggccatcttgctgctgacggtgttcgcgggtgttggcctgcagcgctattatgcattccgacgtccattttccaaaacccgacgtcagcacgccactttcaaatcttacctccgaaactgtatacgaacctcaggcccgatctttcgatctgaacccagagtgtggataaaccgcgacatatggagctgagtatgtggtaagcctgcagataaggtatacccgcagcaacttataccaactgcgatgtgcgagtaccgcccctgcccgccacgtttgtggcacgcaagttggcgcggcagaaaagccgcattcaacgttgccctgcgccggatcattgttgcttttgccccgaactgcgcacgtgttgcccgtcagatttcctttagacagatcgaatccgacgagcgaccatgggcctggacgacctgagtgtgtctgcgggccgcgcggccgagcgcgtcgtggacgccaaggccgtcgcggagcccgcgtcgcccgcgcgcgccgcgcccgtcgagtccgaggccgccgcgctgcgccggcgcacctccatcccgagcaccttctcgttcggcggcgtcgaccacgccatcccggccgccgacgtgggccagcgccgctggcgtagcttcgacgccgccgtggccgccgactcggccgcgtcctcggcgctcgagcagctcacgcgccgcatccagcaggaaagccagcacgtgctcaagcgcaaggcccgcctgtccaagcgccgcgagctcctgcgcagcgtcaagggctggctcagctccagccgccgcgaccaggtcgcgctgctgcagatgcagctcgtggccgaggtggccacgagcaaccgctcgctggccgtgctcggggacatgcgtacactgctagaaatggacgaggccgacgagctaccggcgggccgccaccgtggcagcttcgccgccagccagacgcttctggacggcatcgagcagtcggaccgcgccctggctgaagactggcttcgacaggttctccagctacagtccaagtacctgggcaagctcatcgagctgcacggtcagaaggcgctcgagcctaacggcctgacgctgccgcagctgctggccaagtcgcactgcgtcgtgtcggccgccgacgagccgtcgcccgcgctcgtcaagttcgagaagctgctgagtcgccagaagctgctcaagcccgagctcaagaaagcgctggacaagctctgcctggacaccatgcgcttcttcacgcgagtcagcagccagcccggccccaagacgccgttcgacgacagagagccgcgcgacgtcatgcagtcgctcatccaggagatcgagaacgccgtggccaacgaggcccacctggaggccaagctgcgccccgcgctccgcatgttcgtggagcacatggtcttcagccgcctggcctgcgcctgctaccgcggcacggccgccgacctcgacgagctcaacgcctcgtggcgcgagcaggccgccaagatgcgtgagctgaccctcgaggaggtcggcctgcccgtggagattcccgatgaggccaagcagcaggagatctttagcgagtccattgcggcgtttaacaagatgcctcacctggtcccgtccagcgtgctcgcggccttcatgcgtgctgtgtgcacactgtaccgggaggccaaggacggacttggcctcgacagcagctgcatctcggccgacgtgctgctgccgctgctggtgtacatcctcagccgctgcgacctgccgcacctgcactcgcaggtgtacctcatggagcagtacgcgatcgaagagtcccaggacggatcggaggccgcctactacctggcgtgtctgcaggcggccatgggctacatcatgggcaacggtgccgccgatgacaccgagtcccagtaaacgcccagtcgtcttgtgtggtggatgtgaacacaatgatggagcgtctccgtcgaaaacagaagagattatttatcaaagacatgtaacaatacaaacgagtctcattatcgacaacgtgtgtgaggtatttggtgtttctcttgaatggacgtgtgactcacgtagtgtgtggtgtgtaaatgcatgtttgtctataggtggtgtgtttttagcgagttgttgaaggttcgaaagttactgaagcgagtcgatccaatgccgtactttggcgattgagctctcgaggtctgccgagtaataacaagaagcaccgtaagtatcgctcccaagctttgcgaccagggaaaaatcaacttactgacggctccgcagcgttgcagccacggcgactcgagcaaagtgtcggccgaggcgcggtccagcgggttcttctgaagacactggtggaggaagtcgcagaagtcctgcgagaagtactgaggcgagagagctggcggcggcgcttctagcacgctctgcagcatgtcgatgcaggttttgtgctttgggtacgggtagacgcccgtggcggcctccatgagcacgaggccgagactccagatgtccgagctgtagctgtactgcgtgtgctggatccgctcgggggacatgtaccggaaggtgcctacgaaggtgccgcacatggctgcaaggacagaaaacaccaaggttagagacagtattgccagcagtcagagggcgacgttgagaacaagacactacacagtgaggtcctgactcaccgatggagttaccgagctcggaagcaatgccaaagtccgagagtttgacttggccctggctgttgagcagaatgttgggcggcttgatgtcgcggtgcacgcgtttgttggtcttgaggtaggacagcgcgtggaggatctggaaggccacgctggcgaggacatgctccggaatcgtaccgagctggtggatgacattctccagcgacccgccgtccatgtactcgagcgcgagcaccacggcgccgtcacggaggaatgctccgaagaaggtgacgaggctcgggcacttggagtcgaagagcgcgttgatctcgcggatgatctgctcgcgcttggtcttgtcgtacatgttgatcatcttgagcgccagcggcgtgttggtggggcggtgacgcgaacgcagcacgcagccgctggccccgcggccgatgacttggccgttccattccagctcttcgggcacgacgctgaaggcgcggccggtgcctttgcggacgacgcccgtggatgtgatggcgtatttccctttcacgtaggcgccagcgccggcgatgaaggagttctcgaggttgttcatggtccggctggggagcttgagcttgcgggagctggaggcgagtgttgacggacggggcgatcgagatctgatagcgtcccttccggtgctgcctggtagaaatcaagagcccctcgcgttccgggggttgtcggacgtgccaagttgcgacttcaacagcccgagctggctgccaggtgcttcgaggcgcgcgctactggccccttcgacgttggcagacgtttcgtcgccacgcagaggcagccatcgggccacgcgcagcgcaggaacacgtacaagtacaagtacaagtactcttacgagcacatcaaggtggagcagtattaataacgcggcgccatggatgcaacgcctgaatggggccagcgctggccgttgtacgctacgcatcctgaaagagggcggaccatggcacgactgcaaccagttgaagctactcacgccagccgcagtttcgtgcgagccaacattgaaccacgacgacagacgagcaagcagcttttgacacgcctgtcatggcgtcgctggctttttcacgaacacatcagagctgcgtgtttgctgcgatgggaatggagagtgggccccaccaccctggccgattatctttagggtgatcagcttcgtcttcgtgatctgatgcggatcaagcaactaaggatccgatatctttaggatcggtctgcttcgagccatgatgaccgcgcacgcttccaagctacctgcatgcagcaccgcaagctgaaagcccattgttcaatcggctacttgccagacagcagcagctcccgcgcgcctcgaagccccccagccaacttccttcaagatgcgcgtgattcagatcgcgagtttggcgctgctgtggctctggacgggtgtgcagctcacgacggcggcgttgtgtgcggatcaggtctcgtccggtgacaaggctgtcggaatctggggtgaggactcgccgtcgtgccccagcggcggcggcgtgggctgctttggtggaacgagcacctgccgcttctgcaagtcgttcagcactccgcagagtgcacacctggatgcgtgcgcgacgaccactgcagcttcaacgccgacggtgaccgcagctccgactacagctccctcgactacagcccctcccacggctgctccaacaccggctccgaccgtggcgaccaccgccaacacgagcgacgatgactgcccagggtccctgcccgtcgcgtagtcgatatcaagatgaacttctatcttacatgacagcgaagcctgcacttatgaacttctgcgaatacacaacttaacccccttcatgttcatgttcaacgggttcactcacgtacgtcagatggctacacaaacttcagaatgagcccgtgtgaatgatggttggcccagcgtagcaccgtgctcccattcctgctcctgcggccaacgacacaacacactcatggagacgccggcagcgcagcccttggcttccattgagcgcgcactacgcgcctacatctcgagtgaatcgacagttctggatgctgaagaccccgctcagtttcgggcgcagatgctccgccacgacggcgatgatggagaccatggcctaccagtgcccgtcaccaccgacaatgttctcgtgggcgtgtcgagggctccgtacgtgcatcaactggccgtgatgatcaccgcgtggcacgagaccgaccggaacccgctgctcctgccgtcagacgccaccgacgctacaagcccctcaatcgaaggcgtgacgccagagttctccagtcggagtcgagttcttgcactccccatcgacggcatccacgcgttcgtcgccgcagccaccaatactgaagatgaagacgctactcgtgcagctgcagcgtcgcttgtggaccaactcggcggcgcgcgtggaattctgacgctgctgggcttccagcagaccgtgggcagtcgcaacctggggccactcacgcttcaccaatgcctcgatgcatttgaacggcgacacactcccacagagccgctaacagtcggtgcgcgggcgttcagcaagcattgcgcgcgcagtttgagcggctggtggggagagatgaagggcaacgacgccgccaagaacgcgcgtgctgcgcgcaaagtgcgcgagctgctggctgatgccacttggaagaacgtgcacagtcttcctcatgcacatgcgacgatggaagtccgcaacgcgttggggtacggcgcccgatgggacgcggagaccggagcgttccgaggcttcctcgagccgcccatggccaatggccatgagatcaagtggcggcactaggaattggtctggccattaattgtggaggcggaacgagtgaggaagcgagacgttgcggccgttgttgggatgacccgggtcgtttcacgaatcctgatgcaagtgcagatagcaacttgacactaggaaggcgccaaaggggtcactaacgggctgaagtgtcgtgacagtcaaggaggaaccccgcggagaacgtgcttgaccctgccctacggttgagggtccgttgtttggagggcacaggggtttcgagcgtcgaatgtatcaacccaatgcagagtgcagcaagctatcctttttgctgttcttggtggggcagttcattcgccaattggcaggccgcttcctactcgtcagactcagcagactcttagagaaattccccggccgtttactactgcgcgatgcgagcgattcacctttcgagcgccttcttcctggtgctggctacgatcaaccttgggacgatctcagtgactgccgcttcgtgcgccgaccgagtgtcgtcaggagaccagagcgttgggatcaccgcagtggaggatgcgtcctgtgcttccggcggcttgggatgcttctcggacggggagcagtgccgattctgccggcccgacagctccaccgacaacgagaattatcacctcatgctgtgctccgaagtcaaagtgtcggccgtctcctcgagcgagtccagcgctaaaacgacgaccacgacgaagaccaagtcaaacttgaagtctactacagcgaccacggagtcggtcgaggcaggcatcgactgcctgtcgctcgtgtctgtcggcgaccagggcgtgggcatttctgccgtagcagctacgaatccgacgtgtgcggcgaacggcttgggctgcttccaggacggaaagtgccgatactgtcagtcgagggagacaacgcaaagcgcgccttacatgacgtgcgcgcgtgctggtgggagctctacgtcgactggtacttcatcaaccacaccgacatctgcaccggcatacacgccggcacccaccgccgcgtcaaccagcacgagttgctcgacagttgtgtcgcggtctggactgcagagcgtctcgtacatcaccgacagccgctgcaacgtggcgtccccgacgctggtcggctgctctgctcgaacgtcatgccgactgtgccgcgactacaagaacgaagccaaccagttcctcgtgagctgccaagtgctcaaggacctggggacaactgagagcgcggcggcgggttctggcaagacggagtcagtggaggcagcagaccaaatgaccgagaaactgaccgtgacgactgagggcgcagccgaaggtgttacggctaccggcgcttccgccggcacgacaattgctgtggttgctgcggttgtaggagttctggtcgtggtcatgatgagcgtcatgtacgtcaaggggcgacgcgactcgctggacgagatcatgacgcccgacgactgccccggtggcgacctcatgaccccacacggcggccgtggttacacgccgcgagagggttcgctagtcatggtcgtgagtcagtcgtcgatcgccactctctagagctgttgtggcgcgaacgtaagcaaaatttgtagtctagggcacgcattgtcgtgctttgatcactctcctccagagtactttagctcctacgtacaaaataaatatcattgcattttcattgaaaaaaaaacttgccgtagggctctactggaaatggatgatacatctagatgcaacaatatgtgtttgagaactacatatcccaacagcgtaaaattaaggccaaacatccacatcgcaatgcatgaaagttcccaacgttcactatttcggatccatggttgaagtgcttgatcgcaaggttcttgtcgcgaaatcaacggcttgatcgcatccttcgtgcgatttccacctacactttccattgttgcgacgaaactttcatcacttttgatttcccagtgcaagccattcctcacctggccaacaaaatgcggagcttacgggccatttccttctgctgggcagtgctaacgtgcttctggatgagtgttcatgcggcggcagcagcttcgtgtgagtcccgcgtagccatcggcgaccaaagtgtcggcatttcagcggtgcaagacgcttcgtgcaagaacggaggcctcggctgcttctcagacggcacgtgtcgattctgccagaaggtggcgttcccgcagagcaaccacctcctcaaatgcagtagcatcgccccaacttcacagacctcggcaccgactacagccccaccgacgacagccccaccagctacgagccctcctaccgccgactgcagcgagatcgtgaagaaatcgacgttgaacgggatctcgttcgtgaccgacaatgcctgcaccgtcgcgcgcccgactgcgataggctgcaccgcgcgtacgagctgccgactgtgtcgaacgagcaagaacgaggccaaccagttcctcgtaaactgtgccgtgttcaagaagccggatacggcgttggcacagaccatcgttctgtcggagggggcggcgggtatcgtagaaggccccggttcccccaagtacaccgatattttgctcgcctgcctcagcgtcatggccctcgtagtggcgatcctgggcctggcgcatttcaaagtgtgtcaccgtgataaccctgacatgagctgctcagcggctgaaattggttttgtggatcatgctagttactgcatcaattcggagaaagctcgcgtgtgatgaagtgaggattaatccaccgcaacgacagccaagcttacacaccaccaagcttacgacttactccacaacaggagacacttcgacaccttaatgaattcattcgtccccgtttaataaccccattgacgtcgcggctgccactcttttcattccgatagctatgggaatacgactacgtagtagttagagagcaagtatgaccatcacaattgatagcatcgatacgccgccggccatagcgccgatgcccgagctaacttctgacccgctggcttcgctttcatcgtggcccccggcgttgcttgtactaccttcagtttctcttgtgcttgagccggcagcgctaccagaagccgaagtgaggactgtagcggactcgaaatcattgagtgagccagcttcatcctccgagtcggcaatgctgatggtggcgttgatgtccgtatcgccgagctccgaactactcgaagtttcggccaatacagaccctcctgtgacgttgttggttggcgatgacggcagagcttcaactttgctgcttgtagcgctagaggaagtatctgcagctcccgttgacgttgccttatcaagcgtccctgttgacagcgtagctgcagttgatagtgagaatcctgaagctgtagctgccgagttcacgttagcagtcgataatgctggagcgacttgcgtggctacacgaataccagaatttgaggtcgtggatccagtagatgtcgacaccggggtctcaactggggatgtggtcgttgagttggttgtagcagcgaccaccgacgcacgaaacaattccggggtcggtgtggtggcggttgatcgatctcttgctgatccagaggagcttgtcgctgagttggtcgtagcagccgccaccacggggccgaatgtctgaggagtatcggtgggttcgctggttgctgcatcactgtcacccgtcacgatgcgaaatggtcgcgctggcaccgggggcgctgttgttgttgagttgccatcgttgtcgacggaagtcgcgttaacctgcgaaatcgcgacgacgattaggaatgcggtgatgaacttcatctgcgagtgagccggtaaattgatcaatggcgttgagtacatgtaaacctggggatcacctcgccgcattacaaattagcggtactgctcgctgtaacacatcaagttagcacttgctccaactatggtcacgccaccattctacatggtaccacctcgagcttcttacatactgcaagttgcgtttcctcacggatacagtacagatcacaactaggaccccacgcagataggtaagtgttggtcgagtccgacgtttctgaactgcactggagtcttgagtcagggcaccagcaataagttgaaattgacaccattctccgtgaaacttgccatgattattatttttccacttgtgagctcatttatttattttaccatttctacaggtattgctcgtttcgaagttatcctaacaaccgttcccaacaacatttcgacgtttgtactagaaaccagccatgacaatcagaaccgatagcgtcaatgcacgaaggaccggcgttctggtgcctgagctaacatccgaagcgctagctgcgctgtcgtcttggctgccaacgtttcctgagttcctggcgccccctgcacttgaatcgtcgaaacgacttgaagtggaactgggaactgcaaccgagtcgattgagccagagccattgagcgatccaacacggccatctaatgtggcaacgctggtgctggtgctgaggttcgcgctgtcgatcacatcccggaagtgcttggctcgtggtggtcgaagttttggccgctacagacccttcctgttgctcacttgaggcactgctggtagacgttgatgactgggctgcagtagtttcggctgttgctgcagtggacgtcgttcttgtcgacgttgactgaccacgcgctgctgtcgaaggagaagatgacgacaatgacgttcctgaggtcttggagaccgagttatcattcgaattggtggtggtgccagtcgatgctgtcgatgtcgaagcacgtacaacggtacttgacgtcgtgccactggatctggtcgacgtcgacgtcgacgatgctgctgcaggagcgacttgtgcggaggcagtattgacgccagtactggaagtcgtcgtagctctggttcccgtagacgtcgtcggtgctgctgctgcgggggtgacttgcgaggaggcagcattaccacccgtacttggagtcgccgtggtgctggatcccgtagaggtcgacactgaggcttcatcagaggaagttgccgcggaattggtcgacggagccaccgtcaccgtgttcaccgtctcgggggtcggcgtgttagccgtgtcggtagttctctcttcgttttgcgtcgtcgttgccgatgcatcagtggagacggtggtcccgggctgacggctgttgactctgtggaggacgcacttgtaacggtgcggaaggaccgcgctcccctgtgtagtcgtcctcggatgactcgctgttgctcaagctgctagactcgaccaaggaaaccgagtcccctgaagcagaagctgccagggagtcctgccccaggaccggccagaccacgactgcaagtaggaatgcagtgaggaggttcatcgatcgcgtgagtcggcaaattgctgaatgtcgagcagatgtccctccaacctctcaactgacgaacggttgagtggtcctgtagaagctcaaccctgagaccgaccacagcatgttcatgttcaaattgttggtgtaccgctcgcaccggtagcagatcaagtgggaaagttaacccattgaccagctccagctttgattacctaccgacaatttatccagtgccgccacgatcccccgaggctgcaggctggaactgaggaaacgatcctgactgtcgctaacgcttcctctgtatgatacctccatgaagcacctcatacatgtacgaacaggaaacaccgtaatttacggtgtttcctagctttacggctcagtttggcaaatgataatcgatcctctcctcttcgacaactgagtattatgaaaatgcacatcagtacaagaataatgtaggttctcaagtctacacttccctccgatcgatgcagaattcttcattttttaattcactttaccagagaacaactagggccatcagaatcgatatcgcggatacaccaacggccgaggcacaggttcctgagtttatttccgggccgcttgcccggctgtcaccttgacttgcaccattgctaaaggtgtcgcccatgtctccaacatcgaagccgccggagctccttgaagtcgagctctggactatggtggagctgctcgagccagagccattgccatcgtccaacctggcaactctaatagtgctgatgtttgagttgtcaacgatatccccgaagcgggtgccttccaaagtgctggacccgttgctactagtcgtagtgttacccaagacggatggtgttgcttgctgtcctgtggcggcgctgttggttgaagatgacgactggggcgtagctttggtgcctgtagccccgggagaagaagttgcactaccagttgacgctgactggccgcgcgttgtcgtcgacggtgtggctgctgagggattcggagctgtagcgggcgagttcgcgcccaaagcggtggcaccttcgacattgtttcgagacaccgatggtgctgctgatgggggacttgcgggaggcgccaccgtgataccgttgttcgaaggtgtgactccattggaccccggagtcgacggggattttgtagttgagttggtcgtaccattagccactatagtcgcgcgaaatgtagctggggtccccgacaacgcaagcgggggcgtcgttccgggtgttgctgggtttgcttgattcggcgtcgaggaagcaggatctgaattacttgtcatacccaccaccaccggacgaaatgtcttcatagtgatcgtccttgtcggagtcgaatttgttgccggatcggaggttgtgattgaaggatccgctgacccgctggttcctgcatcagtcggtagtgtcgagacgggggtggtgctaccagcaccggttaacgccgctggtgatgttaagaatgatcgggtggccgcgtcgatcccgttgttggaagtcgcgaggccggcagacgctggtgccgaggtgccgatcaacggagtatcatccgagttggtcgtggaagccacaaccacggggcggaacgtcttcatgtttatcttcctcgtcgacgatggagtggctgccgggtcttgcgtcgccagcggcgaatcagtggacgaacttgctgtgtattgcgttagatcggccgcctcgctatctcgtgtgctggacagcgttcgccccaccaccgcgtgcaatgtccgtgctggtttactcgtaacaaaagggggcggcgttgtcgggattgcgttggatccactcgaggccacgctgctgctggagacgtcgccgttctgagtcgaagccgagttggcgatggcattatcgaccgaggaacttccagaagcagaccgcgcttgatactcctggcctgcgacgaccccgaccacgactgcaagcaggaataccctcaaggcgttggtcatctctctgctactggagccggcaaatctgggaatgactacagtaggtaaaaaagacttacgaacagcggatgcagtcccaccagagtggtccatcggacagatcaagcaagcacgtgttcaactatggtgaaaatttaacccattgaccagccccagctctggacgaatatatcacattgtcccgttctgcatccacgacgctattgcgtcgtgacttgtgccacaagttgtcaagagtcttgacatcgagtcttgccgcgaaacttccagtcgccgattcctgaggacctgctggccgaaagtcactgttcgaccgtcccacgagctgctgtacattcaatgcccagtctcgaaactctcgacagcacgaggccataataacttgagtttatcgtaccctacgagtcaacggatatcggataccgtcgtcaattctatcggaacaagagaagttgtgtggtgttgtacttgcccacgccgtggacaatggccaccgtggatgcaggccattgcctcttgtattatatgttgccagaaaggtttccttggccaggnnnnnnnnnnnnnnnnnnnnnnnnnnnnnnnnnnnnnnnnnnnnnnnnnnnnnnnnnnnnnnnnnnnnnnnnnnnnnnnnnnnnnnnnnnnnnnnnnnnncaaggaaacctttctggcaactgagagaaggacgctgttcacctgggtgagattgaaaattgatcgatccttgccttcttcctctggggtattatacgagaaccattttggtagacaatcactatatgtacacatgagcagtcaactatgcacttacagctaaaagatctactaacttcatcgttggtgtgctgaaaaatacaagcgacatatctagaaatcagtagaccgtagattgtgcatgcatgacagccagaagcaatagaagcgatgcaccaatggccgtaggactggtccccgagcccgatttaacttccgagccgcttgctttgctgctgcttgcggcggcgtcttctcctgtgccttccgaactgccagaagctgaattgtggactgtaatgcagacgtctgagcctgaaccatagcgcgacccaactccagtctccgaattggcgatgctgctgctgaggtttgcgttgtcgaccacatccctgaaaggggtacccgtcaatgtgctggaatggctgcccgtggtcgacgtactggacgatgcagacccctcttgctcctgagtcgcggcgctattggtggtagttgacggccgggttgcagtcgctttggtgcttttcgagttggacgaagtacttgcatcaagcgttgactggccacgcgctgttgctgacgacgagatttccgaagacgtagtgcttgagttcacactcgacacagttctcaccaccgtggcgctgccagtccgggttaacgccgtagctgacgatgctaaagatcccgctgatgcgacttgtgaggctacagtgacaccattactggaggcggtgatacccttgagggcagtagatgccgtcacagagtgtgacgtctcaatagaggacgttgttcccgcattcgccgtactagtaaccaccagagggactgaagaccgtgttgtcgctgtggcagtagttcctgcgttctgtgccgataccttcgatgtagttgaagaaactgcgacggccggtgttagcacaaccgtcgacgacgctgcagcatcggcacttggagttgccgctgcgctagcagaaccatccaccaccacgtgaaatgttgctgacggcgttgctgcggctacatgaacagcattggttgttgctggtgtgacagcactggagtcgtcctgggcagccgacgctggagaatcactcgacgccgtactggtactcgtactcggagtagtcgccgaagtagccggattgtccgtgacgtcgtggaatgtgggcgctggtgtctgcgtagctgttggagcaggagctggcgtcgtgtttgctggcgtgacagcactggagtcgtcctgggcagccgacgctggagaatcactcgacgccgtactggtactcgtactcggagtagtcgccgaagtagccgaattgtccgtgacgtcgtggaatgtgggcgctggtgtctgcgtagctgttggagcaggagctggcgtcgtgtttgctggcgtgacagcactggagccgtcctgggcagccgacgctggagaatcacttgacgccgtactggtactcgtactcggagtagtcgccgaagtagccgaattgtccgtgacgtcgtggaatgtgggtgctggggtctccgtagctgatggaacaggagtctcggttgcagctgtggttgagctccgggtagtgtcgtcttgcgttgacccgcttggcaccgtgctgcccgaggcaccagtcaaaatggtgtctcccgaggaagccatgcttccattctcgaccacagaacttcccccggaagcggagcccgactgatagtcctggcttacggtgagctggaccacgaccgtgttcagaagcaggagaaatctgaagaaattcatcccgaggcgcgattagctggttaacctgcaaattgatcaatgccgactacttcttcgagagcaagaagctcactgcaagactcgacgggtacaaagcactctcaacatatcttgtgacgggaaatggtgtgccggggttggtgtccgttggcagtcccccttggtacatcttgtccactggaattgtaccctagggtgacacgactcgtagtatgagttagcagatcaaataggtgatacatggaatcaatgaagccattgattgttcaacaatgaagccattgattagctgcaactgcggtgcggctcggctcaaacgtacagtacagcacgagcctgcatctgaacacttatcacggcatgggcgtgttgagaagcccctgggcgacggattgggccttatcgtggccgcagagcagctccacgagcttcacgcccatggccatggcagtgccgggtccctggctagtcacacacttgccgttcaccacgatgttctcgtgcttgtagtccacgcccgtcatcttgggctcgaagcttgggtagctcgttgcggctccagaaggtagcagaccgtgcgtgtgcagcacgaccgccggagcggcacagatggcaccgtacaacttgtcgtcctccttttgcttctgtagcagcgtcacaacctccttggagtcgcggaggtgctcggcgccgggcatgccctgcattagtattccatccaggcgacaaagtactacgttagtacttcgagagagtaatactacagtagttaatatgactcacgccggggatcacgacgaggtcgaagctcttgccggcgcaggcctcgatagccacgtcgccctgcaccttgacgccgcgcgacatggtcacgatgttgtccttcttgccaccgacggtggccagcgtcacctggacgccgccgcgcgtcagcacgtctgccagagcgatggcctcgatctcttcggagccgtcggcctatcagaagtaatactttcgttagtaatattccgcttgcaagcgaagtatcataattttgcggacgcacgatggggatcagagcggtgggcattgctgacgagaagcggcgagtgctggggcgaggacgaagctgctgcgcgaggcgagcgagacgatgcatgcactaatacagcgcaagtttgggaatgacgcgcgcagtatctttcgcccgatgtctgtgtgcacaacaccatagatacgatttcaaccaatcacagatgtacctgcgacgtgtgagaattctctagcgtccattgtggacacttcaactgaactcgcacagcttgtcgcccttgaacttgccacactaggatgctagcaaagctgccgttaccatgcccaccatgacgacatcttcccattattcttcatgtagccattctcctcgccatcgatgcgcgttgatgtctgctttcgccgaattggcgactatcgcgatagcgtcggatcgcgggctagggcccatgagtttgacacccttgctcgacggacgtcactttgagtttcgccgccaagacgccgagcacctgccactgcattccactgcagattatcaggcggtaatgacaccgcagcgtttgccgccgaaagttcgcacctcgtacgccaagcgctggctggtgctgacactgctgatcacctcgctcgcgtccgtggtcgtggtgctcaactatcgagggatgatggcgagcgccggcttcagtcgattccaggacaatcgcagtgcccagacgcaactgcaggacgccaaggtcgtggacgagctggtcacgctgctgctggccaagcagagtcagcagagagatgtcgacaacaggaatatgaacacgtcggtctccgctgcgactgttccaaccgaagctgctcctgccctgccaaagcttcgcaacatttaccagggcgacgaggaccatagcgagctgcacatcgtgttcagcatgagctgcagtcagggccgccgcgtgccgctgcagaccatcttgcagtactcggctgttgccgtgggccagcgaggcccgatcacgcagatcctgtcgggctgcacggacgccgagcgcgaggccgtcatgcacgaacccacgctctactacgacttccgcaggcacttcacgccgtcctactcaccccacccgacgcccaacgtcacggacaactactcgccgtacaacaagccgttcgcactgcgccacttcctgcggaacgcgcagccgcccgtgaagcacggcatcatcgcgctaatcgacggagacatggtcttcttcaagccgctcgaggtgaacaccggtcgggacgtgacgaagtactaccacggcacgagagatttggccactgtgaacgacacggtcacggacggcatcgccatcgcgcaggactggttcaactacctcaactccggctggtacgctccgcaggctcgggacaaactcgaggcagtatgtggcggcaaaccttgcaggaacgtgacccgggaagaggcacgcgagtactactcgagcacggggccgccatacatcatgacgcgccacgacatggaggccatggtcgatgactactgcgacttcgtggtgcgcggacggcaagtggacgatgcctggatggtcgagatgttcgcgtacacactggctgtagcaaaccacggtatcaagcacaccctcttgacgcacctgggggctacacacccaaaatttgccgggggtgaacgcgagtactggaacttcgtagacgaagcgctgccgaacccttgtaccgacgattctgctgtggtcatgccctccgacccgcctgtgggcatccactactgccagaagtacggcttcgtcgaaggagaccacaagggccactactactacaagtatgacctgccggaatcactcgtgaactgcgagagccccttgctgcaggtgcctcctgcatccgactgggacactctggagaacatcacagcacctgaaacactcgcacaaaagcggcacgaggtttgggtcgagtgctcgacgaccaaagtcgtcaaccaagccatggtcaagtacaagcagcgcacctgccccagcgggtacaacaccgaacagggcattgagatggttaagccgtagacgcgcgtaggataaagtaaaataatataaccacgtcgtcggagtaaagtagcctgcattaggtggtcccatgagcaacacgacagcttgtcaacaaacgattgggtggtttaaaggagttcaaatgtgcaggccttacgcgatcatcttctcgtgatgcaagacgccttgcatttttctcgtgtctacagcagaccttggcgagcgagatcctcgtacgtcttccggttgagcacgttgccttcggagtcctcaaactcctcctcgttcgacgcattccagctctcagcatcgatctggtccttcaacttttcgtaaactgatgaagcatagccacagcaacgttagtttcagcacagcagcttgcaagaaatgcgcaaaaacttacgttgaatcgcgtctctcatcagcgtaatatcgtggaagtgtttcgtgttcgggatcttgaggcagcgcataccaaacgcgtgacgccactcctggaagtgacggtcgaacgcacgccgtccccaatagctgtggttgccacagatttcgcacttaaattcgacgccaaggccgtgcagcttgtacaaccagtacggaatcggctttccatcccagcccaggggcaagttcaacgggttgtagagttgctcctcctcgtcctcggcctcttcattctcattctccacatccacatcagagaatgcgccttcctcctcctcctcgatttcggcttggagctcctcgtgtgtgcgcgtttgcttgagctccagatacgagattgtgccttggaccacctccgtcaacagctcgtacatacgacggatcaggacttcgtcgaacgcaatgttcttccgcttttcctccatctccttctctgcacctttgcttgccgcagcaccgtttgaagctgctccgttactgtcagcaccgtccgaactcttggcagccgcagcagcagcgaacttcttgtgcttctttcccgacaggtggccattgtagacaccctcggagctgaactgcttgttacacagctcgcaaaaatgtggggacttcttattatcgcctccattttctgcctcctggtttgagtcccatccagcgacttcgtgtagcgcccactgcttctcgaactttgcagaagtctcctcaatcacgtcgtccagatccacgagaggctgcgtgcgtcggtagaaatccaataaatactccttcaagtccttcagatactgctggtacggtgccgactgcgtcttctgcgctgctgggatagccgaaaagtccgagaacgaagccaagtaggccagatagtcgatcgagttgcttgacagtgttttcctccccttggtcctggcgctcgagctcagcgcttcctgcgtcttgcgcgcttgcctaattgttttaattttccagaataaattagtcactgcaacaactagagtaacaattcagaaagcaaggatttacccaccacttgagctctgggatattcaagaaccgcgtgtagaactcgttgagatccacgtacttgccgaagcgctcttcgcccgagaactggacgttcgggtgcagcgcttcctccaagttgggcgcgtgcgagaccaccgagttcggatacttgcggtggaacgtgcggatggacttgagctgctcgtagaacgacgtgaacaccgctcgaccgcgcatgttctccgtctcctctgcaaaagtactataaaacaatagcaacccgcagctcagtttagtagccgctccatagctctagttctgcgttgacgcaagcttgtgacgcacccgtcctcgtcatcgtagagctccttgacgtgcttgctgtgccgcgtaacggcgtccagcaagttgctcactttgtggccgtgcaaaactcggccgcgatgctgttgcaacgtccaaagtgcagccagaaggtaagaattaacgtaaaaagtatgggtctgacacttgctcgtcttctgctacagccagagggacgtacgttgcgcggtttctcgcccaaagtggccacgacggcgcgctccagcgcctcgatctcctcctgctccgcgcgcagctgctccagcaccgtggacgacattgatcggcgggtcttcgacgtcggcttgggactcgggagtaaattgcgccctcccgctacttcggaaatagccggaatgtggtgtaaacaacacgaacaagtgacgaggtgagagatgactgcactccacttcaacgcgctatttactcactgcttttggcttacgcctgccctctctggatgctgaagcaacgtagcgataagaatcttcctattcctaataaacttcttcgttgtacgtacggagatggctgcatcagtcgctgtcgctgtccagtaggcaaatgatgtccatgtcgctcggcatcgctacgggttttgggggcggccgcgcttgacgtcgttgtcgctggtcgaacgggttgctcacgttgtgattccgggacagagaggccatcgagctggccaacgtcgactcggcttggttcagcacctcttgcggaggggagacggccggcgctgatgtcactgcaacagtgggcgccgggggaggcatactgttaacgatagtgctcgcagatatcgaatacatccatgaaggcaaattacctgtgttgctggccgccgcgttgctggaagggaacagattctcgtccaacgggaacgggaaatactcaccgcagttgccgtcgctcgttgggttggcggcactcgaagttgctggtgcgtcccatgcgtcgctgcccacagtcaatatatcaatgtcatcatccagcagaatcggacttgatgcagatgcagcggcagtagtggtagtagtggcgctcgatgtgtttgcagtctcttcatcttcatcatcacttgatagtaaatcgatctccacaggtgctgccgcactcgatcctggtggcccctgtgcatcatcggccgacgttgcaggcgcagatgccccatttgttgaagctgcactaacttctgcctcctcagctttcacctttttcgctggaggctcaggcaccagctcctcgtctagcctccgtttccatgatccatcagggaagatctccacttcctccagctcgtcttcaccttcaacctctgccagaagcttttttaaataaggatcaatacgcagatcggacgccttgataaactacacaagtcaaacataagcacaaagcacacaaaatattagctgccgtacgaagtcacagctagcaaataaggaagagcttgcttacttgatggcacactgtacaccgccacgcctttgatcgcgcttttttgctgaacagcatgaacgttttcaggtcaaagcactgcaagtgcttgcagtgcaagcctcgagctggcaggctaatcacactcagacccaagggacagcggacagaaagtatcgtaacagtcgccacgacgtcgtcttcatcctcgctgccaaacgatttgataacttcttgcttggcgccctcgtacgtcaggttcttcgaggcctctttcacctccgtcacaaggtcattgatgtcgcgcacctccacgatctgaaccatgaacccaaacacggacggattctccgtggttcgtatgtcaaccacgttccggcctactcgtgaatactggaagatattagcgggaagttcgcgtagcaccttggacgggttagcatgtcctggtggagcacgctgcgtaataggcacgccaaagccattcacgcttagctgcgtcgacgccggccagcagtgtcctgctgcaaggtcctccttcaccgcaaagcaccgcagctgcaactccaaattaccgggtgtcatcgagccaggcttcgggtctctgttcgcgtacaggtcgttgtcggtgatgtagtactccagccggaaggagctcgaggtcttggcgaagcgcacgaagttcgggtccagcacggtcttctgcacgcggtagaacgggtcgtacgtcttggaccggcacatttcacagtaccactcgccgctcagctgtatcacagcagacaacgagacatggatcaccagtcgtcagagtgacaacaatctccggccaaaaaaatgaacgcaccgtgatcagctggtggcacttggcgtggacggccaagccgcagtccacgcacttgaccactttgcccgagacgccctgcatcacgcagaagcacctggctccgtccagcgccgcggccttggtcgggttgtacaggtccacgccactggtcagcgggatgacaccattaccggcgcccgcaacgttcacagccccgtactgcggcacgcccatcgctgtccgaggcgcgccgttgcggccatacatgggcacggggatggagcgcgtgggcggcggtgtgggcggcatcgacggatagcgcggcgccatgtgctgcggcgccacattcgcgccgtggtagccattgtggggcgcgggcggcgccggcgtcggcgggggcgcgtaggagagacgccctctgtactgctggtcgacgctgcggaggccggcggagagcctctcggcgtagaaggcggcggacgtcgtgcctcgggccttctcagcgaacgactaaagagtaggcagacagacggacaaacaggcaacagtgaggaaagagcgaggaattagcaggcaaagtgacgccgggaacggacctccagctccgccgcgacgcgctccacgagctccgacttgcggccggagcgcgccaggttcaggtccatcaggatgttgcgcagctccggcatgcgcagctggttcaggcgcgcgcggatgtcgcgcagctgctggcgggtggccgcgtcgctcatgctcgtcgagggccgtcggagatccccgatccgggcgagcgagcggcgtgcgcctaaagcttcttctggcgcgcaattcactcgtgttctctatgccttggcgccatgcctcgcttggtgggcgaagaaccacaatctggcatctggcgacggtggacaccgtgttcaggggtggagactacactgcggaatgtatggcagatagtgaataagagtgaaaagatgtattttgataccctgttctggaatgggaagggtcgaaaatgaatggtttcaattcacggtgagcagttccaccaccaactggtaatgaatgataccgtgttttgcaaataggttgtattgctgcatgttttgaaaatgaaggaaagagacgttgatcttcaaacgagaggaatgcaatgatgtgaagtgtacgaatgtgtattatctgagcatgcttctaggatgatgcagctacagcctaaggtatcgggcgcaagttaaaagccgcgcatggtcgatcgttggcgaatcggagtaaaccagcggtgagctttgatctcctgcagcgacagacgcttctccggttctttttgcagaatctggtaggttggcataagaagtggtgttagaagtcgtcctaccacgtgaaactgcttatgttgatgacgacgtacccgagtgatcaaatccttcgcagatagggacaccatgggtggcacgtgcagctggccctcagtaatgagctcgatggtctcattttgtccctgcagaaagcagcaaagaaaacgttagtccagaagcagtaatttccagacaggtcggcgaaacccagcgctgcgtaccggtgcttcgaacgggggtttgcccactaggagctcgtacatgatgattccaatggcccaaatatcaacagactcgtcgtatttttcaccctgcacatgcatccatcaatgattagatttcagatagtagtggggtatcgcaagtgcgaactcgcccgaatcatctctggtgacaggtagtccaaggttccgcaaagggtgtcgcgtcgagtgctacaacacgcattcataatcattagcataccaaatcgaacccatttgagctagggaaagcgctccacaacgtacgctgccgtcacattcgcagaggaccacccgaaatcggcaagctgaattgtaccctgagcaaatgcaagcacgcccacacggtcagaaaattacaatagaacctatctgtcagacgtactgtaggtacctcgtcagacaggagtaagttctcgggtttgatgtcacgatgaattacgtgctggttgtggcaggcctccagtgcgctgcatacacatcgacgttaaataaatattagttccgcaatcctagaaaaattgtaaagtggcgggtatgtcctgcctgacaagctgtgcggtgtacaacattgcttggcgctccggaaagctgaacagtaagacacgaacatagaatttgtaatccatttcacaacgaaacgttgaacatacagggaaagcatcataccggcgtccaggcatggagcgcatcttcttgtacagatctcctcctccagcgtacttcagcaccagatacactatcacaagcaccgccagcgacaccagaaaatgttagcacgatgacaaaagcatcggctgcgcacaaaagcaaagagtctgcagtacctcgagtggagtcctgaaacgtagcgtagaggggtaggacgttttcgtgtcgaatgcgcgagtgaatctcgacttccttacgcagctggtgagccacgcctgccgctttcagctgttccttcactagcaccttgagcgccacaaccttgcgcgagttcttctctcgggccaggtagacctgcccgaatttgccagcccccagttcgcgtccaatctcaaaatcgtcaagactccacgctttcggcggctgctgttgctgctcctgctcccgttcctgctgagtctgttgatcctcgtagtccatcatttcagcaggagctggcggaggagcggtttgctgttgcacctgctgttgaggcggcggagtcggcgtgcgttgctgcgttcgagtcgctccgtaacctgctcgcggcctcgaagccgactggaacctgctagttgcaccagtactagaatacgtcggtctcgctgcagctgtccgagctgtcgaaccggtagtagccgactggaacctgctcgcgcccgtgggtttcgtaggtgcagacggaactctcgtcccctggaaccttccagtggtgctgctggccgtcggacgagcgtaagacggcgtagaccccgacgaagtaggcgacgcacgtggtgcagatcgatgcgccagagaagacgccgtcggtgccattaatcgacctgcgccacaaccacgttagtgtccgttatgttccttcctccgtcgcaactaaactgcggtctccactgtaattgcaacgtactcgtagccgtcgatcggtagcttgtagtgggtcggtctcgcagcgcctgacggttcgcggcagcggcggccgcagcaggtgacggcctctggaaccgcccggacgcggaggaggcaggcgacgcgtccttcatgtcgacgtcagcagagcccggcgaggcctcaggccggccgaagttggggcggcggttctcgtccgaccgcaggcggaaggagttggcgcccgtggggcgcgcgccgaagcgcgaggctgaggtcgaggctccgctgtacatccgcgtcgtccgagtgtcaattcgcgacctgccgtggaatagccggacaattgcatcggaaagtgtacagtaaactgtactattgtagtttatgacttgtaaatgtagaagatgacactaaatttgagcgatcatttcgagacgggcgccagcttctggaacgcgagctgcaggttgactatgcagccggagaccactggactctcgtagaacaagcggcagaactgtaaaacctgtcagctactagacttggcttgataccgctgaacggagaccaacctctttgaagtttgagctcttcacggcaatctgctcgacctcgcccatgggcgggatgttgaagctgcagtgcaacggcagaggcgtataagttggtactgcggtgagtgaattttacgacgtgcatggatgtacgtgttctgttgtgctacgactcggagtctggcgatgatgcggtcggcaactagggcgctggcgatactgcagacgcacagattagctgattacttgtacccttccaatcttacagacgcaacgcacctctccgaccgagtgctggagctacgcggcgagttggttcgactatcctttgaagacgacatgtcgttgtatatatcgtacgttttgtttaagaactctgtcatcattacgccaaaaggtaagaacacatccccctcgctccgttaatgcggcagacttaccattgtaaaagaagcacgcgctgaacgccgccagcagtgtccgcaatgacgcgcggcgctgtccgtcttcgccttcaggtaagtggcaagtcgcttgttttaccaattgcggaggcaggtccctgcactgacaccaaagcatttcggtgaagtcgccaaccgacagcactgacctcgaccaaatccagagatgaaccaccggaatgagcccacgactagtacaataacagtagcaccagcagcaacaacaagagcgcacgtacgcgtgttttgatctgtcctggcgtagctgcgctgcagctgtgagaggaacgcggcgcggttctgcagacagccgttgatgtactcgaacgcccggcccttgacgttggtgcccttgacgacggcgctgaagtagctggcgatgaactgcgccggctgatccggccgcttgtcctgcagctggcgcaccaggtcgtccacgtagaactgcacgcccgactgttgcaggtaaaactcgctggacgatctgagcagcgacgtgaggccgcgcgacggcagccgcgtcagagttcgcagcttggaggcgggcaatgaggacgacgcggcggcagcagcagcagcgctaccgtccccagctttgccgatttcactactgattgacgctgggatgcggtaggcgctggcaatgagccgctcggcctgcacgcggcccatgcggcgctcgcccccagtgtcgccgctgctgctcatggcttaagatcgtgcgatcgagtaccgtactggtacgctgtaccgtttggactgtctataaaaaggcccgcgcagcatcaatgcagctgcgcatcactattcagaggtaggcagaggcgtcaccagcagttgacaccctcctgcggagaaggccaaggcgggggcttgacgcggcgcactgcaagactcggcagctccctctctgaatgggcgtggacgcggaggcgctggcgcagctggcggccacgggcctggcgggcatcttcgcgggggcgtccacgtacatcagcgtggcgcagcacccagcgctcatggagacggacgcgctggtcttccaggcgcccttcttccggcgcatgtacttctacgcggcccgcatgcagggaccagtggcggtgggcagcggcctcagcgcgctgctcgtgtcgctgctgcagcggcagcgagggccgcacgccggaatgccgcgactctggctggccagcggctgcctcatcggcggcatcgtgcccttcacggtgctcaagatgctggcgctcaactacaagctcgtggactccaagcgctgcgtacaccgcggccagtcgtggatgcaggagatgctgcggagatggggcaagctgcacgccgtgcgcgcaggcgccagcgtgctcgcgttttccgggatgctggtagctatggcctgcggtggggatcggacgccggcaccagcgctcaaggcttcgtagacgatgtgcagcaagggctgaggaggacaagaggagacgaccttgggacgacgctgcgcagacaaccagacaggagacgactataggacacaggaagattattttattggccacgggcgtgtagataccgcagccactcggtcactatgactaatgaatgaccacgttgaagagcatcaagtcccgaagcgttgaaggatcgccgcgagagactgcagggcgggtagtctctcgcagctgttttactggatgaaagtcgcgttgaaaaccatgagagccgcatcggattggcggaaaaagcgatcgagtgctctcacacgtcgcaggttttaccacttcaaggcaacttctgactgaagttcgggaaggggcagcagcgacaaccttgatattcttttggagctcaatgcactttcccggcttggagttcactagagcttctgcagcgctcagtgttgaaaacgccgaccaagacgcaaccaagagccgaacaagtggcaagctcagcacctttcagctcttcgtgagctccacgctctgctcaaaggagacactcgagctagtttatggtacgccccaagcgcttaatgcgttgatcccctatgcatatctctgcccgaatcgctatctgctgcctctgttcctcattgttgagcttctgacctttctcggctgtgcttgccttcacctcagtggatattgagcgagctccgctacctgcaccagctcttcgtgaagaccgtccgccacctcctgcatctgctgtcgacgagcgctagcaaagttcgtgcccacgtcttggagctgctgaggacgtactacagtctcctgttcgcaagcgcaccgggcaaaatccacgagaccatggtcgacttcaaccgctggctcctcgaggtgctcgccgacacgcgctccgaaggcatcgtgtggggcccgtcgtacggtgagaacccctggcttgcgctggaggagcgtgagccgcagccggaagacccggagatcgaggaagccttcactctcgacgctgcaaatacgattcagctgctccgggcgtcgcgcgagcactacatgatgtgctgtgacagcctccgacagaccaacaaggacctaacgatgcagctggagcacctcaagatgcaactgaagggggctctctctctcgcgttcgagtcacagcgaaacctgcagcgtgagaaggagttggcagcgctgcgagagcaacgccccgttctgaaagtccggttcgcagactacttgtacatcacgcagcaggatccgcgtcgtggacacccgagccaggagatagcaaacgccttccgcacgctggaaggtctcagcagtttatcttttgaggaagctccagctggtgacccgactccggcaaatgatgtggacgaagacgctagcgaagcggacgttgaagttgacgacagcagcgaacccgaggacgccgaggtgacgacttcaacctcggttgaccaagcagaacccgtggtcaagcctatcagcggagatgaacaggaatcgtccgagcaacaagcgacccagctgttgaagccgttggactccatttctagtggccgcgactaccagcagcttgtccagttgaacacaagcgaagaagagaacggtagctggtaccgccaagcacttggaaggctgaagacggagcgtgaccaacgtcgtcgtctgcgcaagcccagcaagaagaccactgaagctccatcttctatgatgcgcaaagttgaagtggaagccgcttcgctcaagctttacaagcctctcgcgtttaaggagcttgccgctactcgagacccggctcatgacgctagcgaatcgacctggtaccgcaaagcgctgcaactcctgaaagcggagcgcaagcagcgcgtgagtcttcgcgaccgagccgaatccttctcctccacgatctctatcgtcgactaacatgcaagcagagcagtatgaaatccaagaccaagaaaaccagtcgagatagtcctcgccatcacctcatcattcatgattccagctcaaaccacagtcagatggaccctctcgcctctagcgtatcacttatccctggctgtgcatgtgtagtaagaaacactttaaacaagaaccgagcttactcggaaaatacaacatctccaaagcctaatctgctacagtttacttcttcatacagccattccccgcggtccgtcctcaacaatgtcccgccgccaccaggtatcgacaacgcaacgcaacggagagtctgagacgatggacatcgctctctatctcttaggccgccttctcgagtcccaacgtgaaaattcgcagctccggtccgacctgagtcgctcgcgcgtgcagttgcgagtgctgcaggggcgactggacatgcgagtgaggcagctgagcgagctggtgacgagtattcgtgaattcgttcggctgtatcgcttcgttcgtgctgccgctgctggagatgatgaggaactgcgtcgatcatgctcgaggtttctctctctcgaccgcgctggcaacagcaccaggactaccacctcgttgggccacgccgaagactggatcgaccttgaagaggacgcgcaacggccacattcacctcaccaaccaacacaagatcactgctgaaaccgagacttgaagagtgtaagcaaccggaataccgaggcacctcacaacgttcaccacgttttatcccatgaaatcatgtcatgaaggcgcttctcaagatcctcgttgcgcttgccaagctccacaatgtcgtcccgagcgttccgtaagagataaacagcatagtcgtatttctcctgcatttccctctgctcctgtaggaaatcgttcttgagagcttccaccatttgcgataacttttgcttcgtttcatgcttccactcggcgtgctccagttgcatctgatgcatctgctgctgcagttcgagagcccgtcctcgttgcttctccacttcctccgcgagcttcttctccttgtctgcagtcgcctccaacgccaacttcagccgctgcttgtcgttctcggcttcttgctggaagcgctggcgctcctcatcaagcgcagactgcaagtactcagcccgctcctgcttcatcttctcgcgctcgtcgtcctggatagccttacgcagcttgtcgtcttcctctaacaaggcgctctttgcagccacctcggcctcctcctccactaaccgctcttcacactgcttcagctcctctttgagtctcgctagctggtcgcgatccgtgatcagcagcgacttgcacgactcgatctcttccatcagctgctgcttctcacggggagtctccgtcttcatctgttggaaggcctggacgccgagctgcagcttgcttttgttctgtacgtagctctgcttgcgcactcgcatctccttcgagagctgcaccttcttctgctgcagccctttgatcttcttcatgatgtccatcttctcctgcttcaccgtctgcataaacccaaggatcttcttctcgtttgcaagcgagttctgtcgctcctgctcatacagctccgtcagtcgctgcttctcgtcccatgactgttgcttagctcgctcgaggttggcgatggtctcctccatctgccccatcatctccgggttgccactcgacgcggacatggggcgcgctaccatttggcggagcttctcgatctcctcgcgcagctcgcgaatgatcttttcgttgatatcttcgttcttcttggtcgcgttcttgatggacttggctcgattggcgtacaagagcgtgctcaagctctcctcgtagttgtagtctgctggcgagatggctgcgatcatcactgtgagcgagttgccacccagcgactcctgcaacaacctcgtaagcttcgagtcgcgataggggatgtgcgccgccttgccgccagctttccgtgacttgtcggcagacgccagcacgttgatcacattgcccaatgcactcagactcttgttgatcgcagcgccttccttcagtcgatcacctgttgcaccagtcttggatgcgcgttcagagccggcgaggtcaaccaggttgatcttggcgttcatgcacatctccttccgcacaccagccagcacctgcgaccgcttggacgagatcttgatggtgaagcagctgtgcgagcgagaactgcgctcgttcatctgcgtggcagccacctgccgcaccttgttgccctgctccagcagccgggtcacgtccgcgggatcacgcacgaccagctcggccaactgctcgacgtaaatgcccatgtccgggtgctcgcggatcttcagcaccttgtccgaaggattgagcaagtccttgatgacttcgttgtagatctccaggaacgacaccgtcacgagatacttgatggcgcccccgtcgtcgtgcttggcgttctcagcatcgcttgcattgatgcgagcgaataggtcggcgttcatgagcggcacgatgccgtggtcgtctccactgcccatcatggtgtgcgtcttgcccgagccggtctggccgtacgcgaagatggtgccgttgtagccttgcagcgcttgggcgaccagaggcttggcgatgtcgtcgtacacttgcgcctgcgtgctctccgtgtagtacgcgaagtcgaacgtgtactgcttcttgtccgacgctgcatccgaagtctccgagggggcagttgagctggaagccgaggcttctgcgtctgcagtggggtagatgaccaccgtcgtgccgtccagcacctgcacgaccccgcgcgcacccatctgcgtctcgcgtgagctcataggacggcatcgcaccgccaccttcacattcacatccgtcgacatgacttccgaggtgtcggtcggtcttcacttttggatcgcttgagcttggacaccaagagtcacctcacctcgcctgcacatcaaacacagcagcacaaaccatagagatgcagcagcagcacaccaacaccgtcttctacacagcgcgagtctcggattctttcgctgtcaataaactcctacgtattgctcgtctcgccagtcgagtgtctgtctgtctagttggtcttgggcgtgaccttcgagtgtccgccctggtcgtccttggcctccgtcggcgtcttggcgtcggcatcaggaccgaagaaggcgcccctgaagggcagcagcggcatgatcttctcgtggaactgccaccgcaggcggtccacgacgccctccaccgagtcgagcgccggacgcacgtccaggtacacggacagcgggcggccgggctcgggctggccgctgtagaagtcgatgacgtagcgcacctccttgccgtccctgtccacgacccagtcgtggcggtcgaagggcagcacggaccagcccagcgcgttcatcaggcgcgccttggggctgtactcggtgggcttgcccatgaacttcttgagcttgacgggctcattggccgtgtggaagctctcccacttgagcacctcctgccagctctgctcgttcaccgtgttgtggatggccacgatggtcttcatctgctgcgccttggggtcccagcccttgcgcttcatggccttgaagtacatgtcctcgctcgggtactcccacttgtcctcggtgcccgtctggtgctcaggcgtcaagtcgcccttggggatggaggacacggcgcgcgcctgcgacagccgcgtgggcggggcagacccgttcacggtgaagcccgcggcgtggttggccacgcgcatcatctcggcgctgagcccggcgtcgccgtccactggacacgaagcagcgtcgctcgacttggtcttggagtggtccacggggcagccctgcgccgctgctgctgatgcattggatgcaggcgcagcagcggccggcttcttgtggtgcgggtgcgggcacgccgcggcggcggagttcacttcggcggtcatgggtgtgaatgagctcctgctggccgcaggtggcgatgggtatgcgccaccattggtcaactttcggccaataaataatagataggtttcgaagcgactcctcacccttgaaagtgcgaaatgaggacgaaggtgctctggttgggtgcgcataccgttttacagtattactagccgagcgccgccgctacgcggcggtgaatttttagtttgttggcgcttcgctcgctatgctcgctccgctacggcagtggcggacccgttccgctcgcctcgtcggctctctcaatgtcagggccttaggcccagtcttgtatctcgcgggatgcgggatgggaccaatcagagctctttgttgcgggtcgaagcgggacgctttagggacgacaccccttcttgtcccgctgggatgttgtgtggcgcgggcggcaataatagggcttcgcccaattaccctaggcagggcacttcacaaaagtccttggtatgatcctgttactgccaagaaaactgaagagactgacgatgaagcgcgacgtagtccaccgctcagaccaatacgcgcttaactgttccatcacgatttttcgtccacgtagttcatgaactcaaggcgtggacgttttttaatgatctccagctgctgtaataggaaaagacgagctatcgcggcgctattcgactacggtcggtttgtcgttgttagtcacggactggctgcggcgtcgcacacgagcaatgtcctgtacgcgcaccttgagctttgtttagctcaagtaaaagaccgcaggctacagtcactttcgtccaaggcagcgtgagcgataatcctcttctcagaacgtgccgaagaagtggctggatgtgggtgaatattctgcgcgggggagatatccaagctaacgcagctgtaggcgcatcgtttgaccaagtcgatacatctacagctgtggcccacagcctgtgggggcaggtcaaatcgaccatttctgcctgttcaacaacctaaaagaccgcatcaaagaggttgccaaattcgagctttggtcctggaagcttgatcttggacagtgcttctcggatgcgagtctgaggctgctgcagccttttcgctgcaagcgaaaactgaagtatggaaatatttggggcttcgtgcccacgagttcgatggtgcacgaactggcagaagccaatatttacctataccagttataaatcggacgctcgaacacgatttttgaagcgaatctatcgtggtccattttcccaggaggatttaaaggcttcggtaggtggtcggttgaaaacttctatttattatcagctactatgttccagtttcgccgatagtagaacgcagcccagcgatagagcttccccctctatcgcaacctcctttggccggtgtcgtagatgttgcatgaagacctggcgacttgaaacacgcctcgaactaattcatgcggtagtggattttgtacgccttgtagagactcctggggatgtcgtctttgatttttttcgggaggtatccattggccttccatttcgtgaacatctggaagcggagaatcgtatccttgcccatatttgacagagtgttcgcgccgaacaagccgttccgctcttcattgtcgtagttggagagtttggcttcgccatcctccgtgtggtggcttcggagaaatcgcttgtccacgccagcgagaacattcggcgagtgaacggcgtttacgttcgtcacgccagtctcgtcggccttcgatactgcagtgccgcttgcgaggaggacggccgcaagaacaacaaaggtggtgctggagagacgcatagctgggagttcgttggttgttgggtcttgagggctggacggaaaatggcagaatgagaaacgtggcatttgtccgtcgcccactttccggtacctccagtagcccaaaggaagcggcaggtatacgggctgtcgtaaggcacaaccccaacaacgatcccgcagtacatagtacatgacatgcacaagcaaattgctctcagatccggcctacaacggcacaaccgtgctaaagagagtgcgcagctccaccgaccattgagacttgcaacgagcgtttagatcggctctactgctgtactggcccgtcgccatttactcaaccttttactcaaagcctcctccgtgagcaaacttgtgcatctgcgttagaacttgagtaatttgctcagcatttactccgacaggacgtcgagacaaaattctttccgacaatgaggtccagaggtgcaccgcgtattcggcatgggtacatacatcggctatagcaggaaatcatatatgataggtcactggtacttgtaatgtagtcaaatcccaatctactatcttggggtattgatttatacctggtaactgagaggatggctttgttcgcaagaacacatccgaggatggctaagctggctttgttcgcaagaaacacatccgaggatggctaacatatgatatgttagccaccctcgtatatgttacatatcccatatgtcgatttttctcaaggcgagtacttaggtaagctgttcatttccggatttcccaaaccgccgcctaccactcaatgctccgccgctcgacgcaaccgaacgtattgcttcaatggagatgagtcctacggcagaccgtatgaccgaggaatgttatggtacccatgcactgataactctactaatgacttggaatccgtgttatagtaactcggtaggtcccgtactaccgcagtgactcgctatccgtgttacagtaactcagtaggtaccgtgttaccgtaactcggtatccggcagcggcgctattattaatattatatcctaggataacagcttgtacggctgccatgggcatctgctacattcgggaccttttcctcgccagccaaatcgataatttggctcgttagtttctcccccatcgactcttgtagacgacttgtcacagacaaacaagtcgtgctcggcgcgtaatcttcgcaatcctactacatgtatactgtagctacgtaccagggctcgcaaagagagagcgctataatcacagaacaagaaggtcattttcacagagagtggggtgattttacagagcgtggggtcaaactacatgtacagacggtggtgcacaatcacagagactgcgattgctacacagagcacgctcctgtaaccttcggcacaacgtaacccgtgcaattctgccgcagaattgccgctcatttactatttcatattattgctgctactcgcggttccggctcaacacctgcgcacagtgggggcttctgactgtagcatccagcaaagagcgcgggtgggggttgtcgacagttttttttcttttttttcgcagctacacttggactttgtatgaggcgacaaaccagcctcacggcgatactcgcgatgtagaaaaagaaagtttcaacaacacggatacccctgccaaacccattctatgtgtgtttataacctattgtgctttgcatactttttggcacttcggactgtaacttgtacgacttatctataaatcttactcgagtacgaattgctgtaagtcgttgattgaccatcaagtgcgcatatgtcatctcctgcatgatttagcacatccagcatggatttatccgtcgttgtctgtagcatccttttggcactttccgaaagtgccatttccgagccaaactggcttcgaaacacgacttgagcaagtcgcattcaaagccactatgatttacccctaagtacgaacactaactagtgcactaattaggagggcaaactggttgcaaagcacaatacatactgtagctgcaaactattatacacgggcagggctcagcgaaagctgagataggaggattttggaatacgtgtacctcgacttattcttagtgtttgcgctagaagtgtttttttttttacgatccgcagtaccactccgtttcaaaaagaaagcatgattcaccgtgaaaggttgtttcagaaagatagcacgaaaaagacttggtttgagtatgggagggattactgacatcttcaaatcacgaatgacttgtactttcttgtgcatttccgaagagaaaagcctactagccacacgatattcaagtgtacaaaggtcaattctaaacggttcaggtaaactagcacatcaattgaaagaggagaattcagcagttcaagtggtgcaatttttacgcgaaaacgttgaaaattgatttggagggcgcattttgacgccaatcgtgctttcattttgaaacggagtggtatttgccccgtacgcgtttaaaacaatcatcaattcctcagttatttacttgactttattctagatacgtagttgatctgtggggctgatacctgtccaccccgtcatctccgtgtctgcaagacggaagtctccgtccatttcaacgcagttgcgaacagcgtacaatagtcgctctctgcagatttcgtcgcttgaatagcgcgggagctgcagcgcgaagaagcacgtgtgcgacttgggcatctgcgagtccatccagcctgcagtcgaccctccagctgagctgcctccgtctccaatccccgaggacgctagcgcttggatcttgaacttctggtggaactgcgcagagcccaacggcagacgcgagcgagcccacacaaaccgcaggaacgcgcgcttgtcctcggactcgagactctccagcacgcgccagaaccgctggatgaactcgtcattgggcgacagctcctcatcgtactcggtattagcctgcagcagcttcacgtccacttcggcgaccccgcatatccgcttctcgagctccgtgcacgtcaaaagcgccaacgcagacacgggcatgatggagtgcagtccttgcttgacgatattcatgacctcctgggtctcctgcatccgcgctcgcagcatcgcgtccaggtagttgtccaagttggccgagatcactgcagtgttggagccgtcgtcgcacaattcgaccgtccgtccgtccgacagcaccgtcgtgaataccaggtccatagcctccagctgctcctccaactcccgacgctttggcgaggcagtctcagtgtgtctaagctcgtccgagatgccacgcagcgtcttccagagcgaatacgcgacgaaatcgatctcctttagcgtctccagcgcgctctcaacgttcgagtcgtcctcggctacgagctgcttccagacggacatggccaagtccagacgaacgcacacacgagtgcgcagacacgtgccaatcatctgcccgaggaagtaaaacatctcacagtagagctggcgcttctcttcggcgctttctcccggtgaagctcgggtctgcttgccgttgtcgcccaggtggcggctgatcaacgctccgttgagtacgaacttctcccggttcgcgccgactccgttccgccagttgggacttggcaagaggaacggtaatacgcactccgataccgagacacccggatccaacttcatggacgtactgctgggtccaccgttcgctgagtggtcggcgttgtcagtctctggtacgtgcaacatctgcaactcggcgaagaactgggagaagaactctcggtacgggccgccgtagtcgtccacgccttcgccctcgaacttgaccttgaagctgcgtagctggccgtcgtccatggggtgcgagtagaccatccgcagcgtcttgagcggcaggaagtggagctcctcgaacgcctggccgaatagcgagaggaagaggctgctgatcgttccttcatggcacttggctgctgcagctttcagccgatttacctgcagctgcggcagatcttccgggtagtcgtactcgtcgtcagccctcttgggtgagttggcagttctctccatcaatgccgtccacagtgcgttcttcacgcagacgaagagactaccacgacactgagacaccagacgacacagcagcgagctcgagtcgggcaggaagtagtgccacgtgaggtcgaagaacggcagcgcgcgagtcacgtacaggttgcagaagcgtaggagggcaaaacgagccaccaccagcttctcgagtgtgttttgtggtagcgacagaatgtttaccaacggggtgagctccaataccgacgccttctctttgacgagatcgaggagctgcttcggtgtcaaattccacggactgatccgcgatacctcgcagaaatcatcgacgacgctcagcagctccttgtccaccggaagactccatagtgaatgctccccatactccatgagctcctccgctgacagcgtaaatgacggtgtctgctctttaaaagtcgaagtgcccacgatatctccagacgagaccgaatatatagatacaataggagactcggtaggaggagtgggcagcgtggtcgtcgtaaagttcgccatattcagcactcgcagcttcgacgggtggacaaaccaagctccagtttcattgtccacttccacccagactcttccggcggcagcacccacgaccaccccattaccacgaggcgtccgaactcggtcctccgcgtgaaacccaagctgtccgcacgttgcgtgcgtgacgtcgacccacaaggacttccccgaccgagtagtgacgaactttgtggacccagcgaaccattccgctgtcattttacacgccgcggaggctatttcagctcgcatcggacggttcgccacccagttggacatgatctcgcaggcgacgagacagtcctctacgctcgcactaccgtcctcccccgtcgacgttatggtaaagtctccagtgccgctgcaactcacgcaactgtccttgacgaaggaaatcttctggtgtctcgagtagaacgccaccgcgggacacacctcccccacgatattgtcgaaagccacaccgaggtcaactccgttcttactgaaagccaactcgcccttctcacagtccagccgcaagccaatgcagtcgccctcagtgaacgtctcgccgtacgcgcgcacgcggttgcgctggtagtagagcgccttgtctccgatgaacccccaggactgctcgtcagctccgaggaacgagtcgaggttggcctgacgcgacgcgacgcccacgaagagatagggagagctcgacttgtcgatgcgaaccatccacgagtgcacgcccgtggagaaactcacgccggcgcacgcagctttccacacttcgttccccgagtaggagacgctcagtccgtcctctgcgaaattcaataaactgctccgacttctcttgcggtcgaagagcagcgagcagccttccgctttcgcatacgttggtacagaaggaggcagaggagataccagtgaaccaattccgctgctagtaagtgaggctccagccaagtgctgaacccctttagagtcgctaaagcctgacagacgctggagggcatggagaagctcgacgtaaccttggagatactgcgagaagaacagacggccttgtagcaattcccgactgtgccgcagaattgctgccgacaaaaaatccccaacaacaagttgagactcgctcacgaggtctgttgtagacccatcagtccataatactgccaacagcctgctgatagtccggataaccacaaacttgagcggtaaattcgtcgttccaaggcagcatcgaaggcgacgcagaaccttcttggcgaaatgttcaggaagggataacgaagcgcccttggccgcaaccagcagtgagtctaacatccacacgaccagttcaatcgcaggttcttccaccaccgttttatcaggtcttttgaggtctcgttgagtccacagaacagcctcgcaggctttattcgacgctgcagcttcaagttcatccagacaaaactcgaaggatgccgtcgtaaacgctgtggcgtcataactggtaaagtgtcgaaaagcccttgaaaatacgttatcaggaggaaattcccagagttgaacggagtttgcagtcgtcgatttgacccttgaaacaatcgcgaactggtccccacgtagtaacaccaacttggcgagcttaaaccattgaacgtacgagatcttcagacgcagagtcgaatccgtggtctggtgcagtaacgtgaccatgcaccgacgtgcgtataatgtgcacaaaatcttctcaaactttcgtaattgctcgattaaacccctgaggtcgagttgattcatttccgcttgggaatcttcatcaagtggagagcgtggtgtggtttcagcaataggttcaggggtagtagtaggtggcgttttaaccttcatttccattgcctcagttctccacgcagtcatgaaccgtgacttggtgttggaaagatatccgccgtcctcgaaagggaaatacatttctccaaatagttttcgacccatttccttgtcgttcagcgcgggagcagcaaagccgtctccgttggtgctaggttttacttgactgtcactttgtgggtcactcttcgtagtgtcttcatcgttatctttccatgcggtcgactggagccagctattcgatgaattcaaaggcggaggttgagtagtatcagccgctgtgtcatccgaaggcacgacgtcgtcctcttcctcgtcaaaacgcggcgaatcgcgccccttgtcgcgctctttgtccagcgatgactgcagtttactaaggtactcgagattgtcgacgatccaggccgacgcactcacgatgtcgttctcagtctgtttcaacgccaatacacaccaatcctccgggaatcccatgagcatcaactcctccacaaactccgcccgagtttcctccgcttcgtcgtcgtcttcgtcgtcattgtcggcatcgtcgaggcttccttcgtcatcgtcatcatcgtcgtccccatcgtctccgtcgtcgtcatcatcgtcgtcatcgtggacaggaacccgcacgtcctgctcgtcgtcaccttgagcaggatcccaattctcgtcggacaaacccacttcagaagctgcaaaactcctccgccctgtggctcttgaggccgaatagtcaggattctctctatctagaccagacacttgaggttcactctgaatgctggtagtgggggtgagtatatctgccagctcagactcccccgcttcaccaagcccaaccaacgcggcgtatacttcccttcgtagagtactcactctcttctcaataaggtaaagcgtctcgtgtttgggattcccgtcttccttcaccgctaactcggccatgacatcaatgagctcaggcttcgcaagtagctcgtcggtgcctacttcgctcccagctatttgaaccagaatcttcaacagcatacagcccacgtccatgaagatgggctcagaattcggtaccaagttaccaccgagcagagcgggatacaacttactcgccttttccaccacggcacaaaacaatgtttgctgtggggccatgtcgtagataatactcggataagcgtaattgctcccgttcggattgctcgctccaactggattcagatcttcaacgttcaccttggaatgcgttggacacgcatcaacatcttctgcgttccacccaaacactgtatcgtaccagctctcggagttagatcttccgccggcagagttcggaaccggttcaaagcctttcgtgttgttatccacgcggacgtaagccagtgtgtcctgctttgcgggcggctgtgctgatccaggcggggtctctgggggattgcgctgcgaagaacttgacgcatggtattccagagataaaacctgagcaaactcccttgagccccgcatttccacagtagctccaggtcgtaagaactcgacccctcctccaaggaagtagaagcagcctaccgactctacgcgtttgatagcggatagttgaattgtacacttcccgaatcgtactgtccgagggtcttctcccacggataaagacgagaaattttgaacaattgtggacgcagcgctgatgatgcttcgctgccacgcgccattcggacacctgaagagccgaaggagaagctggttgagctcgtttgcgatcattaagcactggcgcttggacgactggaagcggagctcaatgtcattttgaagatcgttttggtgatcggaattgtcttggacttcaggggagaactgactggcgtgaataccgcgggcaatcatcaacgtccaaggaaccacgacacaatcgctagtatctccacttacacttatatgaggacacttactcaggcaaaatccgattgtccggatcacttgctgcacaagaacatcatctaaacagtaaaacccgaaatgttccaaaaccacatccgagcaatcttgcaccagcactatagacgcctccagagggtgttgcaggggtaaaagagcgcctaatacccggatagcagactgctgtaccgctgcagagctgctgcccagaaacgtcccccagaccaaccgcatccatttggaaaactgggacgtgaagtgcaccaaaccctcagaggagtcacttagcaagatcaacagtgcgtgtagttccacgagtttaaactggttgctggtagttccgtccgaaagaggcccagatgaaggcgatttcttctcgtcgaacacgctccgaacgtgaatgggggacagcgaccgattgtggaagcggaagtggctcaaccacccgtcaaagcatcggaaagcgcccgacttcgatagcagagcgagctctgatgcgttgttggacgtcattcgtggatcccattccgcagctttcatgatcccaagcgagcgcgatagaaagctgatagctgatgtcacggacgccacagggcttggatgggaagcttctccagcggtggggaatctaccgaagtggagcggtaaatctacatttccagccgcccagattggaatactttgagccgcaagagagcgctgacagtctagtacgccgttcatgtacagacggattttagtcgcttctaggacgaccgccacgtgaatccacttgcccccagctactgcttgtttggataaaatccgctcccaaatccgacctgtaaccgtgaattcactgcctgcagagtccgcttctcggttcaagtccatcaagatccccacttccagctgccaattgtcaatgctctcgggtacgagcaccaagtaaagcgagatctctcgagcagcacctcgcatgaacactagctggcggtcgtgaggcaagccaaacagctcgtcttgaggtcgtgatgctgctgtggagttgatgcacagccacgtagtgacgctgtattcgttgggttttaccagcggagacatcggggtcgtagagtcagtgcccgttgtggatggagagatcatgtcctcatagctgaacgtgactcccctactctgggaagaaaatcgatggggaattgtgatgacctcgtagctccgtcgcaccgcaacaggaaccgccggtgtagattcaaccaaagtctcgacatttgcaccggtaatagtcgcttctaatggcaaaaactggtttgaaactgagacggcttcagtgtacagcaactcagcaactcctgataagactgggaacgtaggcatatagacttctcgtccactatcgacaatctgaatcgcgaagtgcacaaaaatatagcggaacagaacccagagcgtgtcttccaagcgcgagagctgtttttcagtgataaattgcgccagcgtcggcagccccccactcctcccaacgatactatccacagacggaatctgcactgacatctcgccgtttgtaccaacaccacgcttactggaaagaccctggagcatatcctgaataacgccgagtatgccgatatcactgacgaactcgaactgctcggcgttgaagtggacgccccaggcgcttagcagcgctataagaatccaaaacatcgaagaagcctccgattcaccaggttccatcaacacggccgccttgtccgtcatcatctccgtcagctttcccacatactcagagaacgcatcgctctggaggctcgagtagaagttaccaacgttgcgagaccccgctaggataaaatgcccagaggattgaaacacaaacacttgcgaaacttgatgaacgacgtcagcttggatcgaatcgaacgagacgatggtcagaagttcccatagattttccaggccacggacagagcagctcacgcgtcgacacggatcgactagtaaggctcggactgcgcctctagtcgatacttcttcatccgatgtaacaaacgccagaatttcctgcgagacatcctgtcggccagattgaagcatgttcttccaccgtatcatagtgtgcactagaattctgaccgttctccacctcgacgtagggtatgctaccaagaacggcagtttttcgtcagtgtacgttgtgtggagatgcctcttcgccgacgaagctgaaagcttaaacgctgagctggcggagactaggaacgcagggtcataaggcgcaatatagcccgcatccagctggagattcaagtgttcctgctcttcgtgcacatcaacgagtgtcaaaagcttgcagcggtcgataatcgtctgctgtacagttaggatgcgatcaaatgcgttcactcgaggggtgccagcgtcaggatgggggagattcttgatctccgtcttcttagcggcaactcgtcgtcgtagctgagccacccactgccacaagctcagcaacgacttcggtgggaggcctcgtgcttctggccccgttcgattcagacctagagcgaagtgatacgcttgagctccgagcatgttgtggtgaagtagagcggcgaagaatgcggcctcaatccggacgtcgttctcgtggatttgactctccacggaggttacagaagccttgaggttcatcgagagctgagattgacgcacaatcatccggtaggacgcgtctttcttggcgtagctgtcgcgaatccaattgcagagcttgctcccagcgctcgaagaatccgaaccgccgccactctgtagcgaagtcaggaatctctgaatggatccagttcggaacatttctccatagtttgcgtcggtaggagcctcccacgataaggaaacctccttgctctcagacgattgaggcaaggtcagtgagaagggatgggtgtggggccccagcgtggacggtaatgacgacgcggaagcggaaaaaggagtgtgctgaataactcgaccgttcttcgagctctgtccgttcgagtgcttgatgccttgcgccaaggactgagcattcaacccgcctcgaaataggggactagtctgccaccgctccgacaatttagttgcttctttatcgctcttgtagttgaagtaggggtctccaatgaccaatgtcacggccatttcagcagtgagaacagccagttccttctccaatctgtagtgccagggcagcgccatggcgtctgacgtcgttaacgtctttcgattgagcgatttcccgtcttcgtcttgagtagatccaagagaaagcaaattgctgtcgcttttgcgtcggaagctcccagtgttctccttctgcgggggtcgagggctcacggaagacgcgatactctcaacgaacagcttctccgcttcctccacagcaacgtcacgctggttaaactcatccactaatcggagtaaactcttcaatgtcggcaacaacgccgcagcgaacagcgagttgttgctaaactcgaacagactgacgaccaatagcggcaaaaattgaccgaccatcgagtgctccaccacctccagaactctagcgtgtactgcattatcctgtagcccagaaccgaactcaacgcggtggtcgtatccgtaacttggactggggagcgactccagcgagaaaacctgccccagcacctcgcagcactgagataaagtcgccagcgcgaagtcaatgaagcagcgccaggggattggaacacgccctaaatcgctctcatccacgcggaaggcgcgatccacaacgctagcgatttgaccttcgatcccaatgctgggaagtgtctcgtcctttaacctccactcgtgaacgcttgctgcccagctggagaggtgcttctgcagccctccgagagtatcaaagaatgcgcgtagcgtagcgacctgtcgaggctgagctgctggtgctgtctggacggcgactacatctcctagacgacgcgagaaatccgccgcaatgcgttcgagtagtagttgatacacttcggtaataggagagatctggtcgctctcgctggtctgttccgacgtcgacggggtggacgctaaggggaggaaccggacgatgagcgagtcttcggctattctcctcagcagcggctcgagcagaagcgctttggactttggtaaagagtcaaccgaccagagatcgcgtctgcatagcgctccacacgaatgttctggcgtctcgtgggtcgagagctcgtgcattgtatgtatacagaattgacgctggagacattggcacgggaagaacaactcgaagccctgcatgagcgttgcagtagcttccactgcaattctcgctgcgttctcgccctcactggacgcgttgtcgaggacgtggcaaacgttgcgccggtgtttgatgtcgaccagcgacaggagaacgtctcgcacctgtacaatcgccacccgggtccgatctagctctttggtccacggtttgctgtcagttatgcaggttttgcgggtagaacttcctgaggacagcaggatcaccgccttggccatcccagagcgcaaaagttgcgatagattcgcttgtaggatccgaatacaggccagaagcatgtacatctgcagttggccggtcgggtttgactgcgttgctcgtctgggagtagcagcgacagtcgttgctgacgaagagcttggctgaggcgctagacacgacgaaagctgcgacgtcgcctcgatcttcttggtgctgaggtgctttagcagcactgcaatgctctcgaacgttgagctgcagttgtgaatcccaaagctctcaaaactcccttcaaagacgcaactcgcgtcaaacgaagaggttgttggagcaccagcattcgttgtgagagactcgatgacgctcatcataggatgtagcagcgtcgggtaagtcccagccttggggatgaaaggttggcaaagcctgtcgagttgagccaggatgatcatagcaatgaaaagcgcgtctgcagaatctggaggaatcttgctcatgcctccacccgctgatccagttgtgcgatggttgtcttcatcacggaagtcgtcgtcggtcgggtcaatcgcaggaacttcggcgccggagtccgcagcctcaaaggtcctcatcaggctcgagctgctttggagctctggacgcttgctcggatctagtagctcctgaacagaaggagacgagagaatctctgtatgtgtgatgccactagcagtggactgggaaccctctcccttgtcgttccccgctgcgtcttggtcgttcttctcgtcctccttcccacccgttagcacgaccgtgtggtaaaaacccgcggctaccaacgctacgcgtttcccaacgaaatcgtcgatcgggaatggatacactcgctcattcgtgtcgcccgtgcccagttgtccgtggttgttccgaccgaagacgtacataactccgttgtccgacactgcgaccgtatgatagcagccacaggcgaagcggacgatgtctttgccctccagctcctcaatcaaccgcgcgtacgagaaccgctgttgctggagctggagattggccgtcgagctcgcgttggcgcgaccgagacccagttggccatagtcattccgtccaaaggcgaacaagtgcgctccactgcataaaacaatggtgtgataatagccacagcggatctctagacactcgtgcttctccaagccagcgcggacctgaacagggaccagttggttctccatcgagtcgatccctagctggccgtagtcgttcttgccgaaggcgaacgccttccccgtagcagtaaccaccattgtatggtactggccacacgctaccgagacgacgtgttggtcccccattgcctcgacatgttgaggaactttacggtcgatggaatcgttgtgacccaactggccgtagtcattgcgaccgaaagtgtacaagtactgctggccactgccgtcctcctcgcaggccatcacagtgtggtaatagctgcacgacacgagtcggacgatcctgttctccaggctccgcacgatcttcggcacgctctcgctcgcagtattcccatggccgagctgccctcggtagttgtagccgcaggtggctgctctaccgtccatcgtcacgagaatcgtatgctcgcatccgttgtacgcgtgaacctgcgagatggcgttgtcccccatcttcggcatctcgcacaggtggctcacgcgcgccgtccccccttggccacactggccgttgtcgttatacccgcacgtgaggaccttcccatcgactgtcagcgcaatggtgtgctcgttcccagcgccaatctgaatgatttccttctgctggagcgactcgatcctctcgaaagacttgcgagacgccgtgtctccatggccaagctctccgtaagaattctgtccacagctccacacttcacggtccccctcctcctcgtctccgacgaatgcactactggtagaatccccactcgcgcgtgaagactgaaacaacgaagcggttggcttccctcttgacgctcgcgttggagctgaaggtttcgctcggtccagttcgatcagtactgactggatgttgagcgctttgaacttcggacacctcgcggtgacgacgggtgtttcactgcgagtgctcatggctgacgtggaggagtcccgggtcagcgtctccctcatcttggtcatgtcgagagagaggctggtgttgcccatgaggatcgcgcctttcaggtcgtcctttgtcctctgtttgctgatgaggttgttgcctggactgctgtacagcagtcggtggtgcgtggagcttgagtgcgtcatggccaggttcactgccgctgatcccgccgtggcgttaatcccgatcgccttcagtcccttgggcagcgtcttcttccgtaaactgtcttgaaccgagctatctccgagcatttcgctctctcgtttgctgcgaggactccccttctggggtttgctggagtccgggcgggttactcccatctccttcgccttcagcttcacttgagccacttcatcgtcgtcacggcccgaattccttggggaggggagcagctcttctgcccgcactgtagatagcgaagggactgaggaagtgagcagcgaacgcgacgatagcgagcttcggagctccttcgcccccgtgtcgaccgtgtagtcccccgcaccaagcagcactcgcaacaccacgaggaagtcccgtactgatcctgtcgcagcggcgagatgaatcaagccgttcactgcgttagtgcggtctatcacgtccaactccccattacccgacgagatcgctggcagctttggggacgacgacgggatgttcgtgaaccgagggcacatgtccagcaggaagcgctgcatcttctccgtcaggtcggcgatgtccgctgcaccaggtgacaaacctcccgacgacagaccaagacaccaagaagacccccgaccccttaaagagccaagccccgacgtattcccactcattccccgcctcggagacagcgccaagaagcccatagtgctgagcaccggcagcagatcctctagaaactctcgacgctgggcctgagtggcgacggcagggtcgtggaggtcgctgagtaagcatacgagcacctgaatgcccatagccgcctccctcaccaccttctccttgggcttgacaggcgcagcaccagttaataccccaacggggtcagcaggcggcgactggagctctgaagcctgcagactgacgtccatactctgggcgatggcgagattcaactgcaccgccgccttcctctgtcgatgctgagcagccaccgcctcgtgcatgctcctcatcaactggcgacgcagtgagatcagctgatacactgggttggggaacgcgcagactcggcgtagagcgtccttgagtttattcagcatcagagccgccagctccggctgctgcaagtttccgagcacgcacagagcgttggtgagctcgcgctcgctcttctcctctgcgtccgctccgtcaagaggctgcttggacgtcaactcggccagcatcaaagcctcctctttcgactcgaactcgtcgtcctcggaagatcctcgagccgctttggtctgcgccgccagcagccgctgtctgatggtcttctcgcctgtcagactcgcgctctctccatgcgttgaagctcctggcctcccgacccgacgagctccttgcgtgatctcgatgcgtctcagctgcttggccaggaactcctcgtccctcaactgggcgaaggtcagacgcccccaccgcaggtcccgacgatgcacagacgacgtcgaacttacagcggcggtggttgatgctccgaattgcacggaacgaggctcgtatcccgtgccattgacattggcgtggccattgccccgctgcatcgttttgcagatcctgcagacgaaatagaacgacgcttcgatggcgataccaagtgcgactcgactcgactctagtatcctcaaacgaccctccaatttatggatcgtacaggtaacttacggtagcggcaggagataatcgatctcgtgttgcgccactccgctgtcttgcagctttttgcgagaaagtagcagctgcaccatcgcctcacgctgagcagactcgagctgcacgtttttcaaggccaactcaatctctgcgtgggcgtcttcacgggtgttttccttctccttgagcttcagctcttgctccttcagcttcaactccttctccttcagattgtgctcacgctcctggatcgcccgctgctccccgtacgcacgcagcactgccgcctgctggtccttcaaccactggactgagtcggcgccggattgactgcgagctggtggcgggtggacagcaagtggacggttcggtagcgctgggtgggctgcaagtggacggtctccagattgaggtggcggtgggtggacagctagtggacgatccgctgcaagtggacggtttgttggtgggcggactacaagtggagggtccgctggttggcggactacaagtggacggtctgctccagctcgacgtcgtggtgccactgctgcgtcagcgttagcggcagctggcttggacatgaccttgtgcagttcgtcgtagtgggggcaacgactaagcacagcagcttgacgactcgtttcgtccgcgtcccgagcctctgcactggtcaggtagtgctccgcctcgcggtactgcttctcgaggttattaatcttctcgcgcacgccggcgttattgcgatgctttataccagcagcctccaggcgctgcattatgacgttcagcaacgcctccttcgtgttgccattgctccggtcactgccgcaccacgagccgtagttggtcgggttggtgaaccagtccagcaccacccgaagcgaagacttgccgccgccgacaccgtccgagtcccagaagatcgggctcttcttgcccgcccgcgtcgttcggcaggtcttctcgctgcgtgccgcctttcgcgcccccgttgagcggctggcggtggacgagcgcttcatttcgactccgcttggcttggctcccctcgcttggaaattcagactggattacaagagacttttgaccaatcggagccgacttttggtttccttgaaacaaaccttgatcctaagaagtctgacgttgcgaacttccggtggtggtcaaattgaatggaacgaggatcgaagccgggtgccttccaaaacctacatagaaaagtttaattactggggttagggcgcattaaaggggtcattaaacttgctgattaaacttgaattctttggtccgaccaagagcctttatttagcaaaggttttggattgaagttcgaacatggcgttcctgggctactgctctgctctgcgcgcgcaacgaggctctcatttccagattcaccggctgtagtgcaagtgctgccgtccggaggaagttgaccggtacgtcactcgttttcttgaatagcacggggtctggttacttacatgtaagatgttaagtggctaagccgtagaagcagacaaccgcaacaccgccgttggccttcagcggtgcgtctccttgcctatatgagtctcttccagcgtctgaacgatgtgttgcatgtttccgcaggtgtatttcggccgggagaagctcgagttcgggctcttgagctgccctatcaaacaaactacgactgcctgcatcggtatgtatgagtggcgatattttcttacatctcattgctaacttcctttcttgtttcgaacctgcatgtagctacggtgtcaagcatgagcccttcgcgtaagcgcgaggcaacaccacgtgtgagtccacgctcgaaaaagaagaaagaagctggatcacccaggacgccttgtccacgactgcgttcgggattcatcgttaggcatcctctggtcgtggaggcagcgaccatgcaagttcgatcgctggcgcagtttgaactatctccttctgcctcgagtgggtcgaatgcgcatcgtcagtccgtcccaagcccgtcaagattcttcaagtcgagaccaacgacgccgtcggctacgatctcgcgtatacaaggggaagtacatggagcctgccgccttcgcagcccttggccttatcgcgcatttgcgccccaccaatgtttctgaggcatcaacgaagcctgcctcggagcttggcaaggagatctccacgacggccgcgttggaaaccttcgcggagcctgatccggagccagacgcagagcagttcgaccaggagcacgacaccaagttcgaccaggagcacgacaccgaggtcggcacggagtacggcacggaagacgcggagcacgacgcggagcccgacacggggccagacgcggagaatgacaccgagttcggcacggaacacgacacggagcaagacgctgagccagacgcagagcagacacggagaccgacacagagcccgacacggaggtcaacacggagttcaacacggaggtggatacggagacagacgcggagtttgacccgctcaacactgagggaacgcttggcgaagggcggatgtacctaattgaagaggagtggacgatcgaagaatggccggacgacgtcgtattcttgcacgaacaatggaatccccgccactggaagtttccacctgtcagggtatccggaatggcgccgggtgtggctgtgagactcggtgcaatgctactgcttgtttgaatgccaaggaaagtcgattttgttgcgagcgaaattgttcttttggtggtgtttgtgggaacgcactacgtgagaatgattctctgcttatcggtagaagttcgcgcaccggtatgcgcggcttgttagcttctgcacctatcgctgctggtgaagtgcttggggaatacttgggacatatcgacttgttcggcccgccatgtcgaaatgggcccgtcaacgatggctttcgtatgcacttgaagacacgcacgacggggaacaagcacttgggaattgacgcgctggagagaggtactatgctacgcctcatgaaccatgcgtgtaacccgacagcgcggtttcatgaggtgcagtgcggcacgcacctcactgtggttgctgtggcagtgcgagacatcgaagccggcgaggaagtcactgtgtcgtacggcgacaagcaatggttcatctgtaggtgtggctgggatggctgccaacatcgagacatccagcacctcccggacgctgcgcacgagtcgtgagccctccagggaccttcgcaacggtcacgtggtcaggctctgaaatacgcgagtgtttagcaaacaggtcaggtcttgaactctgcgagtgtttagcagacagaaatttcgttgcagtttgttaaggtcataatgaaacaagtaagtttgatcttcaacatgaggtcttacacttccctcctcactcttcaatatacctgttagctgaaactcgcgctaagatccaagtcaacatggcaggggtaagctttcagagagactggggtatcgttgtgcttctaacttactttaaatgtgtaacagcgcggcagacgtgcgggatacaacaactactcggtccaggaccaaatgcttctctgccaagttgtggagcagatcgtccctcttggtcgcaacatgtgggagcaggtggcttgaccatgccctacctgtgggccttccagtaggcgctggtccaaccgatcgccaacctcaagatgacaatggaagcgacgcaggcgcggttgaaagcggggacgacctcgatccagccgaggaagaagagcgcgatgaagtcttgtctggtaccgcccaagccagaggtggtgacgtaattagccagtacgcacagcgcacggctctcgagggcccatctacaccaactacccaggttgagggcaccattatgaccgattcgggtcctatcgacgccagcttagccgctgacttccatctatctgctgacgaatcatctgaagacggcgatgctgttacgcgcactgcaccggcgtcctcgcagtcgccggcatcaagcactgaagggactgctcccacggaggaaactgccccctcggcgacgcactctcgtacgccttcaacgctggaaaccgagaataccccgaggcgcaactccctgcggtctgctcagcatgctgctgcaacgtcaaccccaacgacgagaggaatgcgggcagcaggtcgaccgagaactccgcgccgcgagcgtatcccaaccagggctacccccgacggcccaacactgagtcgcgacccgaaccgcgaacaggaagacgcccgtgaagccgaggagaacgaaaatctcagcaacgccagcaatcgcctaggcgggcaagacttgcgcgtgtgtgtgacaacatcgcagtaatgacgcagaacatgttgaacgccaacggtaagcgttctccagccgaaggagctaggacggatggagcaactaacggcgctacgtatgcgaagggcaagcgggttcgcgttaaacagcgccttgacgaaatcggaaaggacgttgatgccctcgagcgacagcaggccacttccaacggagggctgatgagcatgcttctagtccttcaaaaagacagcgaccgacgcgcggaagcagaggagcgacgacgcagagacgagagaggagaacgactggaaattgaaaagagagagcgcgaagagagagaaagagctcggcaggaagaagcgagggctgcagaatcccgtagacatgacgagatcgaggctgctcgtcttcaacgagaggagcttcgccgcgaggaagccgcacgccagacccggcttgaactcgagcgcgaagagagtaagcgtcgctttgaggagaggatggctctcgatcgtgccgaggcgaggcagcgtcatgagcaaatgatgcttgtgctgaagaacatgctgccgaagtaaggatcagagcaatgcagaaagaggacggtaggaaaaaaggtggtgtctgtaggtattgcatattaacaagttacatgtcctctttaccaaatacgaacgttgtacgaatctggcttactcctgttgttcgcacacgataattggcaagtcggaagagattgtcgagtcgaagcttgcgattttccttgtcgtatggcagggggtgcagcaaacggcgatagactttctcgacagagcccattccccactcagcagcttggcgaacgaaggtaatagcgctagattttaggagggccgcagtcctgacagacggcagcaggcgactaagatcgccttccttcaacggagtcatgatgcggccgaccatatccttaccacacggaaatgcgctgtcggcgattacaccgtaacgatcgtcagggttcggcgttgggtccaggagcctctctcgaaactctatgctggtatccgagtcgttccagcttccaggacaattatgcttgctccacacgataagcccatcggcgctaaagcacaacgttcctgtaacatacacggaatggagtcagccattgtaatgtgcattctgcacatcgcgctccgacggctcctgcacctgaacagcagcataccggccacgaagctctagttagcattgttatttaagtaaagaaagataagtaaaataaacgtaccgagtaatttttcccatctagaaacccccaagtaaatggaagaagtggtgctcgggcagcagtgagtcgcgctaaagctttttggcgagccagcgtcggccaaacgatcctagcaggcaaaaacccagccagcgctctcttcatagactcttcggcaccggaaagcacacgcctcagcgtagcgggagggacgccgaagttcgaacagagagacttgtgctgcatagaccccacgtaaaaagccaaaagaagcccaagcacttggtgatggtgctgtagcttcctgggtcgtcctcctttcggcctaaatcgtgggatacaatagaacgtggaaaaacgctccagcagtcggtcgaacgagtgtctagtagtttgcatgaagcgcatacgaagcacggttttcgcgcctaacgagatcttgatatatagagaaattgttagaaaatttgtcctgccaaaatctgtcccattgtgatacaatacaatattgtagtgttgatcttgtgcctgggcagtttttcccggacacattaaccaattcataagggttttggacgtcggatttcggtgcagctttttaatgcgggataaaacgtgaccaagggtggataaaagggtgtattaaacggagtcgcattagaccgttttatgtaggttttggaaggcacccaatggcaccccccccccccccacagtgcatcgtatataagtagatcttgctgtcactagcgggaaatcgaaccagttttcgacggcgctaagtgccactcgacactactcaacgcctctccgctgcccccaattcactcacccatacagacgcggcaggtacggagaaggtaacactggcccagtcattccggcgccaaaatgcatggaattctagtgcccgggatgcaattccgagcatgacaatccagcgacaaatttgacaaaccctccgttcgcaccagggggggtctgtacttggtgtcccttgctccgtcattttacaatttgctgcgtacatccaaccaagttatatccccccacccacccacccttccttcgtcaccatgacgctgctcaagcctctcctctcactcttcagtctcgtcgtaactctccgcttcgcgtcgggcatcgagtacacctccaatggagtcgccatcgtgggcacgacggagcccctcgacatcaacgtgaccgccggcacctcccgcgaggacctcatctcgtaccaattcgcgtcgtacatcgccgtccacttcgccgacttcaacctgccggacggagattccgtggtcatctcgtccccagacgccaactcctccgtctcgcacacgtacacagggcgggggcgggaccagagcggcacgttcatcgccagcttcgtgcccggtaactccgtcaccgtcacgtacaagtccgtcggagctgccacagccggacagggctaccgcatcactggctactcgcgcggatacccgaccatggaccaggagtccatctgcggcgacggagaccagtcgctgcccgccaagtgctacgcgcccggcacgaacctgtccgaggggctgcctcaagcctacaagaaggcgcaggccgtcgctcgactgctgatcaacggcacgtacctgtgcactggctggctcggaggcagcgagggccacctcttcaccaaccaccactgcttcgagcaggaggactgggcactcaccacggacttcgagttcgcagctgagagctcgtcgtgcagtgaccagtgcgagacgcagctcggttgtgccgggacgatcgtggccacgacgtcgacactcatcgccgacagtgaggacatcgactactcggtggtgaagctgccggactgcgtggacctgtcggcgtacggttatctccagctgcgcgagtcggggccggtggtgaacgagtccatctacgtgccgcagcacccggacggctacgccaagcgcatcgtgagcactgtggacgacggaggtgacacgacgatcctcagcgttggagaggacggaagctgcgggacggagcaggtgggccacgacgctgacacgcagggaggctcctccgggtcgcctttgatctcgtccagcgacaacctggtggtcgccattcaccactgcggaggctgcgcgaacgcagcgatcgacgtccgcacggtgctgacggacttggcgtccaagaacgtcacgatcgagaacctcgtggcgtcggacgatgccggccagcgcgatttgccgctctacgctcagacgccgtgcactgctcaaacccacacgaagcacggagtgagcaagagtggattgacgacgacagcctcgaacaggacgaggtcggtggctacggggaccaactcgagctcgagctcaccttcgccggtggggacagtggcggcctcgacggactcgccatcggcagcgagcaccaagacgacgagcacgagcactgtttcaacgtccaactcgacttcaactaacacaacttcagccacaaccacgacgacctccaagtcggacaccaagggatcaacctcgtcgtcgtcggtctccacttcgaccacagcgtctaagactgcactgacgtccgcctcggtggtgacgtcgacgaaagccacgaaaacctcctcagctccatccagtacggcgtcgagctcggtcacctcaagcagctcatcgacgaccacgtcgagctcgaattcgacggtatctacctcgacatcgacatcgaaatcgaccacgacctccaaaatggcggattgcgactcgatgtcgggctcggcttcttcggaggacacggtggacaacaacacgatcgtcgcgaagctcaaggccgcggttgtggggtctccggcgccagcgactgcaacgaaaacaggtataaccacacccacatctactccgacgccgacgccaacgccaactagggcaacggccgcgcctccgtcatcaccggtgacgccctcgcccacgctcacatccacgccaaagccatcgacgccgaggccgacaccggcatcgacatcgacatcgacatcgaccacgagctcgacgcgtaaaccaacgacggctccggctgcaacgactacttcgacgtccgcgacaccgaagcctagtgcgactccagcggctactacgacatcaactcccaagccgacgccagcttcaacttcggtagcgagcagtggcagcagcggctggggcgacgtcgagcagaactaagatctctcctagcttggagactctgagcattgcatcactggggatacttcattttgtagggcgcgaggaatgaactcaggtcttctaaaaatgtaacaacttcttcattctctgtgctttcgctgcacagtctgcttaccgccttgagctataaatgctttcgttaatcaactaacttgcgtccaagcgcacaccgaaacttgctaggtacgagccgatgatgaatgtgccaattcgagccacgcatcgacgcgcaagggctacactcgtgaagatgatggcgggacctctggggtaagcacccagggtttccctccacgactgtcatgatgacagggaccgtcatctgcgatgcttatcacgaccgcgccacccgtcatctacccctttatacttttttcgcgcgggagcgagggttctagaagggatttgctcggcaagttgccgacgccgctgcacgatactgcagctgcagcatcaccgtgatgcccaccacagtctccagtgctgcactacatgtacatcccgatgcactaccgtagaagtacatcaatttcgagggaaagatacccgactcaacatcagcattgctttaccagggatatttacagtacaaagtatatacaattgtcatggtgtgaacttcaacttgatcggataagtattgcagattctttcgaatagcgacgagctcaaggcaaataatatgtatgtgctgcagtcagaagctctcgcaagatgtcatgttgaccgtgaagtacacgtggtcggcctgacgttcaggactcctggtccaggagtcctggatcaggagcatgcacttgggctgagacatttgtgtcaatcgccattggcgattggcgaatcgccaacggcgatcttcgtgcgatgcgcgactacatcgccacgatgaacttgacgatgttatacgaagccgcgagcactccgcaccagtccctctggagacttgtcaaagtaatttcgaggccatcgttggggctcgaggttcggctcgttggaaggtgccgtcacggtaagtcggacgtttgcgacagctgcatgctcttacagccgcgcacagttgatttcgcggtcgaccgaccgcagctctttgacagacagcgattatgatccgcagcgtgttaaatcctttcagccctcttaatattgccgggtaactcgagtgagctgggcgtgagtaggatagatacacccacgctcagcacatccaacttatatggtgaaagttgcgctgagctcgaagttagcgcattgcatgcttcatgcgtgccatatggccacttcgggcgtgaagcattatgtgcatcggatccgcgcagcgaggtaatgggtaaacaggcctccctgtcacaagaactgcccgcgacgaccaaaacgcaaggccagcgtcaaaatggagcgcacagctacaaggccatcgacttcacactcctcgcagactatgagccccgcgcacgcatggtactggtctcgatttgggcaaaaatggccaaaacgccccaagtatttgcgcagaaaggaggtattccgatgaaggtgtgatcctgtagtgcacaattgcaaatgcttgcttacgctccgacaagtggagtccatcgtgtcgcccggtcactaacccaatgcgtgcctttcccttctggaacgcagtggtgaatcccaccgggtgtcgcggccccaatctcggacagccctcctcgaagttggtggcaagccgtcaaaagggcactcgaagtccacttcattcttcaatttaccatctcggtgagaagcagcagctgcagacccccctcttcaaccagtcttggttgacatcttgattcgccacaaccgtcacttcaacttcctctaatggccgcgcccgagctgagagtgagtgtcaatagcttccgcgatggccccaccgaaggcagccagacctatgccatcatcgtgtgcatgttcgcctcgctcggcggcttcttcttcggctacgaccaaggcgtcacgtccggcgtcttgatcatggactcgttcctagaggactactgcgtaggctggcacaacttcacgtacgaggattgcacacgctcgtcgtccgatctccctgggcagtggaccacgttcaccgtatggtacaacatggtgtacaacctcggctgcttggtcggtgcactgatcggtggctacgttgccgaccgcttcggccgccgcgccacgatcttctcggccggcgtgctcttttgcatcggcacgtgctggttatgcgtcactccgtcgcaagagcacaccatgatctacttcgcgcgtatcgtccaaggcttcggtgttggcaactcgtcgttctcgctgccgctgttcggctccgagatggctccaaaggagcttcgtggtcgtctggccggactcatggccatcccggtcactttcggccagtggctcgccaacctcatcaacattctcgtggagaatacggacgagggctggcgcatcagcaacgccgtctcgatgatcccgcccgttatcgtgctgtgtggcatcttctgcgtgcctgagagtcctcggtggacgtaccagcacaagggtcgagaaatggccgaaaacgtcctccagcgtctgcgtcaaacggacaacgtacgcgacgaattggacgccattggagtccaaattagcgaagaggagaccggcaacaagggtctgcgcggactttgggggccgtcgattcggcgccgcgttatcatcggaaaggtgattcaactgggccagcaagccccgggcatcaaccccaatatgacgtacggctcgatgatcttcaaggacatcacggatgctggcgtctacgcctcgctattgcttagcggtgtcaactttttgagctcgggtccgggcttgatttggctggacaagtacggacgtcgctacatggcgctgatcggtgctgtgggcatggtcatcggtcatctcttcgccgccatcctgttcaccgctgtttgcgacggcaacgtcgacaatgctggctgccacggttggtggatggttcatctgcatcggcactgcgttcttcgtcttcagctactccgtctcctgggggtccttgccgtggatctactgctcggagattttcccgctcaacgtccgcgcgtccgcggtgtccatgtcgacggctgcaaactggatcggcggcgccgtcatgacggaagtcgtgaagctgttcccatacctgaacatcaacggcgtcttcttcctgttcgcgggtctggctgtgtgctgcgggctgttcatctacttcttctgcccagagaccaagggcctcctgctggaggacgtggaggggttattcaaccgtggatacagcacctctacgtctccgtcgtttgtcgaggccaagactccagttgagagcaggaagagcgctgtcgctgtggtctagagcaaggcagcgggcgtttgtacaatggtcgtcctcctcgctgtcgtacatgtatttgtagcagcagcagtgacttcgtcgctcactaatgtgtggtgttctaaattaaatatacgacgcaagtccgtgccgcttgctactgcagagagacttggtgttgtagcgctgcgccatgtgcttcagcttcagatgtcagatacgaaaactgaagttcgactaaggaaaagatgcgatagtcgaacttcagttttcaaggaagatggacggcacacggtgatgtgcagcaaagtgccagcgttctagaatcggatggctttgagcagttcacagagcttcacgcacggttggcggccaacttggcccctccgagccgtgggccgacgctgcagcctgcgtcatctcgttgaagttgttgttgaatgccttcacgggatcgggagagtctgcccttcgtgccatcgctaccactggtcagcacaactgcaacttggtctttattagacgagtgaccggcactattggtggtggggcttcctcgccgccgccccctttgccacctccatactggtcgtggctgccacggttctggtagcatgtctccagcgttaaacgctctgcaatatgtaggcgctcgcttgagcattggtccggtacacgacgtcgagcacaattggggagaagttcaagcgggcatcgcataatgctgtagatcttggccgagggcatatggtgcctctggtctcggtattggactgtatagggcgtcgggttgacgctcagtgaccgctcgagcttaccattttgcggtgccggtgacgtcgaaatggctaaccattgctttgcagggctctcgcaccagcccacgccacagccaaaggatcgctgtcgctgataatgagctgagtcaccagcaaacagcagcctcccgattgacttgacgttctcggctaccggtagatgatccagcgatcctcggcgaggattcctcgcagactaaagttagtcgcacccgaacacgccgagtgcctgctcgccgccgccgaaggtgcaagctgcctgcggacgaccggttctaatttttcggccgcaacctcgccgcttgaaggccggcgtggcgtggctccctcgccgtcgtctgcgcgcgtttcttcggattcaagctgcgttcccaagcccaggtttgactcgctcgtcagcggcgcacccatgcagcccggcgcgtgcacgacatctctttcggcagggtagtgcgcgacgcaggggctcgcggccgagaccgcagtcattccgctacagcgcgcgagacgcggcgagcccgttcctgaagctgtacttgcgcgtggccgccggcaatgtgggatcgcaggttctgtcctggtgccgcgcgttgcgctcgcagatggctactcaaagacggtccggctcacgcttgacaggcgtggaagggcccatccgcaggatcacgtgaaaggggagccgagactatgcccctggctctggagaccccgagccgacgatggagctcggctcgagcgagaaacgcacgcggcgccttcattcccctacgttcattcctgaatttgctctccggccccgaagctcctccagcctcctcctcctcgccccgaccagcttcggtggacatcttcaagactcaccgccacgtaaccaggagcgtccacacaatggttgcgagcgtgaacgtcaacagcttccacgatgccgagaccccgaccacgggcagcagccgatacgccatcatcgtgtgcgcgttcgcgtcgctcggcggcttcttcttcggctacgaccagggcgtgacgtccggcgtgctgatcatggactcgttcctcaacgactactgcgtcggctggcacaacttcacgtacgaggactgcaccaaggcgtcttcggacctgcccggcgagtggaccacgttcacggtctggtacaacatggtgtacaacctcgggtgtctggtgggcgctctcatcggcggctacatcgccgaccgcttcggtcgccgcgccaccatcatgtcggccggcgtcctcttctgcatcggcacgacctgggtctgtctgaaccccgcgcaggaccacacgctcatgtatctggcgcgtatcgtgcagggcttcggtgtcggcaactcgtcgttctcgctgcctctgttcggctcggaggtggcgccgaaggagcttcgcgcgcgtctgtcgggcctgatggtgctccccgtgacgttcggccagtggctggccaacctcatcaacatcctcgtcatggacgacagcaacggctggcgcatcagtaacgcggtgtccatgatcccgccgatcatcgtcatgtgcggcatcttctgcgtgcccgagagtcctcgctggacgtaccagcggaagggcagggagcaggccgaggcggtgctcaagcgcctgcgacagacggacgacgtgcgccacgagctcgaagctatcggagaccagatcacgcaggaggagaccggtaacaagggcatgcgtggtctgtgggagcccacggttcggagacgcgtgttcatcgccatggcgctgcagcttggacagcaggcgaccggcatcaaccccattatgacctacggctcgctcattttcaaggatatcacgggcgccggcatctacgcgtcgctgctgctcagcggcgtcaactgcttgagcacgacgccaggtttgatttggctggacaagtacggacgtcgctacatggccatgatcggagctgtgggcatggtcatcggccaccttttcgctgccattctgttcacggcgatctgcgacggcaacgtcgacgactctggctgccccacggtcggtggctggtttatctgccttggtacggccttcttcgtcttcagctacgccgtgtcgtggggcgcgctgccctggatctactgctccgagatcttcccgctcaacgtgcgcgcgtccgctgtgtctgtggccaccgccgccaactggatcggcggcgcgctcatgaccgaggtcgtcaagctcttcccgtacatgaacatcaacggcgtcttcttcatgttcgcggggctcgctctgctgtgcggcctcttcatctatttctactgccccgagaccaagggcattctgctggaggacatcgagctgctcttcagccgcagcaaccacacggccaccacgccgtcgtacgtcgaggtcaagaccccagtggccaccgccaagagccccgtcgccatggcctgagcgatgggatcaaccacgcgcggtggacttttgtacagtgacccccatccatcaaatgtgcgcgtcctcgttcctttagttagttgaaagagcagtagataataagcatggagttgtaagacatggcaggacctccgagtcctcgatactgcagtcgtccacttcaacttcattttacgtgcgccacatcacaattattgtcagcctcattcaattcctactcaaaaaaatattgtcatttggcgccacttttgaatatgcaggagacctggcggccggcggagctgccggcgccgctcgagacggaggcgctggtgcagctgaacctgagcacgcgcacggagctggaggcgtgggtggaggcacagatggcgcgcatcctcgaggagaagcgcgcggaccagctgcagtcccaggagcacgcgcgcgcagcggacgaggcccagcgcaagcgcgaagttctgcagatcgagcaccagaagctgtcggccggtgcgtgcatcaattattttagtttagtttaatagttgcaatacgtctaaattgctgacgacgggtgcaacatggctacaaaattcacttgcagacacgcacgccaaggagagggagctgaacgccagccaggtggagatcgaggtgctgcaggccgagaagagcaggcgcgagcccgtggtcaagcagttggtggagaagacggtggaggaggacgccaggctcaagcaactgctagcggactcgcagaggcagcgctcgacgcaggagcagcagctgcatgagctccagcaggggctcgccatgtaccagaagctcgggctcttcttcgagcacacggagggtgagtgcaatgcagtacctgcaggtggggcgaggaaggagtgtactgatgtggaaattgttattgcagccgaccgaattgtggttcggttcacgcagatcgacgcgcagaatcccagtcgcgagttctccttccggatcacaatcgacccgatcactgacaaatacattggtgagatggctgctcggttgctggtgagagagatcataaagacactgacgggttgatttactcctttttttactgtagttgacaactgcaacgagaacgtggcttcgctgagcgacctggtgcgagatctgaacgagacgggcgacttggcgctgtttatccgctccatgcggcgccagttcaagcagcttgtgtagatgcgcgttatttgttgctgacctcggggtctaattcatggccgaactcttcatatacggcgtcgtttagtgttttgctgtggtgctcttgccggcagcgggggttgtcttggatgtggaagttgtggccttggttgtgctggtggcagtctaggtgcaacatgtggtggccttgaaggcaattgtggtccaatgaagtctccgttatcttcagcagcaggaagcgggggcggtaggggcggattccattctgctggcctcttgttcgtcgtcgttgctactctcctctctccatgagggaagttgggccgagctcgacgctgcagcagctgccgtctctttgccagcttgtctgctgtatcctcgtgcgactcgaactgcggcgcgtaggatatctgcagtcggctgccgtaaaagggcttctgcacgccgcgcgccttggcgtggcgcgcgttgttcaccgtctcgtactgcacccacaccgtgtccgtgaactcgttgtcttcgtcttcagcctgctcgaaccgcagcgccgcctgccggtcgtccgcgtggtccagcagtcggtactcgcagaccttcccgtatagactgagccgcttgagcaggtcctcgatcaccccgagcgccggcacgttgcgcaccaccacatagcgcgactcgctggccacagtgaatacgcgcacgctgcgctcggccatgaggatgaggatttctcagccagccaaccgtctatggaatgctacagagacacggcaacggccggcggatgttccgacaccttggtggtggaacagattccgcttggactcacttcaactgcagcaatccgagtggatcgcgacacgatcgtaagggtcaaaggtggtcggtctcgactcgagccaacaaaaactgatatcgattatatactgatgcgacgccaataacttaacgagcgccttccgttcgacgtactcgtccgcgcccctctcttctccgatagatagacgtccatttcgtcgctgcccctccagccagcacgaaccatacctcgtgaccatgcacccacgcagcttccactcaaacgcaccaacgtccacattcgacacgtccattggttgtcgtataactggcgacagcccctttcaatcgtcgaaggggttccagctctgagtggttgacgaccggcgcggcgggggcgtgtcgctgttgcgcacggcgtgctgtgcggggtcaaacggggccgacgacgaatagtttaccacaccggaggcgctcaccgtgatctgggacgcgctcagcggcgccacatcggcgtagtcgccgtcgctgtcttcgtcctcgccactgccgcgcgtgggccgctggctgctctgcgaccctcctctctgctcgtcgttctttccgacgcggaggtcttgcatggaccgtcgaatggcctccagcagcatcaactcctcaagacgagcggcgtccgcgggcgtcgcgaggagatgcgacgccgcatcattaagcgacgccatactgttcgggtgcgggctgttggtcaccggcttgtcgctgatgctgagctgcgagcgcagcgagtcgcggatgcggtgtcggtcttccaccgacgcatactgcacactatgaggactggaggtcgcctctggctgcgacggctcggggcgcttggggatgccgatggcgctgctgcggcgcggagacctcaagtcctgcgacgtaggtaacataaaccaggagttcgacatgagtttctcacaaagaccgacagagggcggctgtcggtagtttaacgtaccttcatggagcggatggtcgccagctccgcaggcgacggcgccgtgtatcgaatcgtgaacgcctcctggttgcaaaatggacagctacatgtactcacgacgcatcaatcaacacgaggtcccagtacgtcgagcttcaagcacggatgtcggcacgcaccaaatggatttctgcggcgggcggatctgcaggtagcactcggagcaaatgggcttgttgcagcagctcgacatgttgaggctgccggggtagaactgcagtaggtagacacaaccacaacgcactggaggtcagtcgctggactcaaaacgaaccacggccctcctcctccctcctgcgcgtaccatgaagcagatcgggcactcgagcgcgaagcatccctccttcgcctcgcggccagggaagcgcggcgcgatcttgcgctcgacgatgagccggcgcgcggccttgagctcccacggacagctcgggtacaagctggaagacacacacacgagaggttgtcagtccccgagggcggaggttacactgcagggttacgcgcgcacgtaccccgtcggctgtgtgaacttctcgagctcgcggttgctgacggagtggcgcttggccttcttggacgtcgagttccccatgggcctctgaggctgctggtgctggtgtcacgcggttctccttgccgagtgagcccgagctccagcggtgggcacattttcttagcttacgcgcagaaaccgggcgcattggcagaaaacgagcaaaagtgggtttcgaccaatgagggacgtgtatattccacggaacgagcaaatcagctttcgcgcagcttgattgaagtttactgggaagcttgtcccagagggtcaaaatgtggcaagagccacattcggtgccatttttaaggccgctccttctgcagaaaacagtttttatctagtcgctgctttctaccttcatccacactctgtgctgtgctgtacgacaatcctgtattgacaacagtcctgattttaagtacctgcacactgctaaatcatactgttcgaagctagaattgcctcaaccaggattttgcaacagcagtactatctgctactaacgttattgccgtttgcagatattttggccaacgcatgcttattatctcgtcaataatctcgattttaatccagccagctcttaatttaaacctaggtctgatttatatatctcgccagtacggtctaagatccgagcttggggctctgttttctcgaccaaggcgcttttctacgacttggaaacgggccaaaccgagtttctgcctaaaagcggcccccagcaaagcataaagctaaatcagccctcgcctatctcgtgtccactcatattaagagacaggcgtggtctattttagaggtctattttagagggcaaagtatttgcaagcggcaatattaatacccttcttttcagggttttacaaagttcccttctgagtacaataaaacttaccattttacgcgcaacagcaacggcaaagtttcatctcgatagcgctatcaacgattcattggtacgacatgctatccctcagctgttggttgatctgtcctggctcaaaagcgagaaccggtggctcaggtcacttttggctgagacttctggcgcaatcagggcgggaagccatgtgtggactacattgtgtcggacaaagtgtaggggcctgcgatggcgcggtgtccagagctgcagccgataataccatcccaggatcaaacgtcgcaaacccaacaaaaagcttaaatatggcgcccgaatctctaaaagtgaagcataatttccaaattcgagtggatcctcaaacgacatacttgatcctgaagtccatggccgttccgcatggctcgagcgtcttcacgtccgcgaccatcgtacgtcgccttccaatgtgcttcgtcccccccatcctggacagttctcaccgctaacgttgccgctcaattgcagaccgaaacgacgggcgaggccgagcacgagcagatggaggagatcgaagtgatcttcggcagctttgagcgtatcgatgggaatgcattagtcaagtgcaggaatctgcagaagctcacgagtaagagggcattgctttaatcactgggaatgtggtgtgctggcagttaattattctgtgcttggctgtagtggtgaactgcaacctcgaggtgatctccaacctcgaaccagtgggagcctcgctcacccacttgtgtctgagcaaccagaacctcactcgaatgagcgggttgtcatcgctgcgtcaactgcgacatttgtatctgcagcagaaccgcattagtcgaatcgaggggctcgaaaggtatctttgtcatggctttcgtgagcttacctggctggataacgtttatttcgtaactgaattcagctgtcggaagctgaaaacgctgtggctgtatgataactgcatcacacgtgtggagaaccttgggttttgcacggatcttagagagttgtggcttcaggtgagagagcaccgggcgattttttctatcagaaattaccgtacttcctaactctaactcctgtgttttgtttaagagcaacaaaattcagacgctgaaagctacaagcggcgggatcgccgagctcgtgaacctacaaaggcttaatttggcgaataaccgtatccgcgatgtggacgagttcgagcaccttcggaaactcgtcgtactgcgccagctaactttcgccgacgaacattttggcccgaacccagttgttgcccacccagactaccgatccttcgccatcacgattctgaagcaagtacgtctagcctcgccactatcactcgcagatgtcatgagatgggatagttttgagctgacaactgtgcttgtttttctttgtatacaacaattagctacgtcagcttgacggaaccctcgtgggtagtgatgagcgaacaaccgcgcaagaccagttcttcacacaggttagcgctggttgaaacaattgagtgtaacattatatctgccaacactgaaatgtatattgcattgtagtccatggaattcaacgatcagttagccgaactaactcttgcctatcagcaagagctgcgctccatttctacaaggaaagagcgcggcatctcaaatgcccaaatgctgcaacgagagctcatcgaggctctgaatgacgtcgaagcgtgcgttaccgctggacagtcgcagattgaggaggagaagcggaggcagcttcagcttcgcgagcaaaacgctcagttactgcgagagaatgtggccaaactccaaaaagatttttgcgcttcgattaaggagcagtgcgagcgcgaggagagagcgttgcttgaagaagaacgcgactacgagattatggagctggaagcaatggccgaacaaaaccaagcgctcacaattgcaacgctgcagaacgcatttccaggcaagattgcatttcagcagctactgcagcacatgccggactatcgatacatcgccgagggttttcgaagaccgacaaaccagcaggaagcactgtacggcatgggcgatcaggatgaccgtgaagtccacatcttacagatctaccgcttcttccatggtgacttgactgaagcgtttgaagctgccgcggcgagaacggatatcgaaggaggtaccgggggcagtgagctgtacctgtacttggtggcagacgacgacgaagtgatatcgctattgcaaaacggagtggtgtctccaacctcagccacaagtggtaacgacgacgacaacagctcgagcaatggctgggtatttctattctccaacccattggttgcgttgcagttttacaagggtacagtcggtgagttggagccgctaagtgacgacgagacagacggcgacactcactcagccccggcgtctcctgaattcagctctactgacggatcctccctggttgagagcttcaatatgctgctgtgtcaagtgcgaatgccgcagataattgagctgttccacccagagaaggcgcgtttaggctcactggaagcactgcacagtctcgcaagtccacgaggatctgtactgccaccaccgccatcagcgttcctgcaacttaacctgggcgaccgtggctcgtggtctgcttcaccgtcaggtggccacgtgtacatggctcgtcgaggagcagtgcactctcaggtactgccacaatttgtgttgctgtgctcaaagcgtagtgagctttccggcggcaacagtctgaacggtggacgacgcgcggaggaccaagctccgaccagtgaaatggtgctagcccagttccagcagcaactccgagctgaggtggacgcctaccacgcgcgactgtaccatgaaatggacccggccactgtgcgcgtccgagcgcagttccagcacgagagcgagcagctccgcagtcggctcaagggcaacgaggaccgcatcaaccaggaaaagctggaacaggagcgtctactgcgcacactccgaggcggaggggacgcgaaagaggagcggggaaatggcaggcggcgatgaccagcggcaacggcatgtccatccccgacctgataacgacatggctacactacagcagaggtccagctgctggtcccgtcgtggatacaatacagccctggtctccatcttgccctacagccccaatgcagtggcatcgtctcaagtcgggaaagacgtcgccacccagtagtccaagcgtacagtatctcgctcaaatctatctgagtacctctaaccatacatataacagtctaaatgtgcaccacatatctaccttaattacctacccaaccgctgataacacatacccttcccaccccgctccccgccgcttctcccgacccgctggcaattcagaacggtgattcacctcattcatcatctcgccgtgtatgatccggcccgtggacatgatgggcaacgggggctgcgacgcgttgccgcgcgcgccgagcgagcggtcgccgctgctgcgcgcgctggggcagggcgactcggcgtcgtacgagggctcgtacatgtccatgccggcgcccgcgagcgacggcgggcggctgtcggactcggggggccagttccagccgctggtcttcgccgagaaggcgctggccgcgctgctgaacggcgtgctgctctacgcgctgggctgcgtcgtgggcgtggcgctcgtgtcgctcaacttcgagggcgtgctgggcgcgcgcgtcaactggtggctggtcttcgcgcccttctggctggccaacgccgccatgctctacgcgcacgtggccagcgtgcgccacgccaagacgctgcggcgctgggccgacgtcgagtccatgtccaacgagccgctgctgcctctgctgcgccgcatcgtgctggtctacgccatcagcttcccgctctcggtgctgctgctctggagcgagctggccttctgcgccagtctgcaggacacggcggcggccacgagtctctacatctgctacacgccgctcatggtcatccaggtggccttcgtcgtgcgctacctgctctgccggtcggacagcacgctgccggtgcgtcgagcgagagagagagaaaagtatctttgtgtcaattgtggagatatccaacgttttattttatttattggatgcagggcgtgtgctgggtgctgatgttcgtgttcacgctgctgctggcgtaccagacggacacgcagcgccgcttcgggtcgcccgagctgacgcagctgccgctgtcgtggtgggtcgtgttcgcgccgctcttcgccttcgagctgctcatgacgggcgcgctgctgctcgtgctgtacaacgagttctcggggatctaccgcctcacgcgctggcagctggcggccagtgtgctctactcgctggcgctggtggcgggcgtgagcggagagctcatgctgctggagcaggtggactaccactggggcaccttcacgttcccgtcgggcatgatgttcttcggcctcgtgtgcgcgtgtgtggccatgtatatcgtggggcgccaccacgtcgaagagctcatggcttccaagggtggggccgtgcccgtgccgttgacaaggacagcggacggctggatcacgagccacgcggtggtagagcagtgggtgctgttcggagacatctacctgacgccgcaggggctccaccagcgcaaccagaagacgcggagcaattcgggcgtcgagtcggaagcagcgggcagcaggtttctgcggcaggtgaaggggatgctgacccgagtcacgtcggacgacaacatgagcgagaacgaccccgagcgccgcatccgcaacgtcctgcgacgaaagacgtccggcagctacagtgacatcatgctggaggtcgtggatacgcccaagacttcgaacaaaccgtaatacttccgtctaaaataatagtggagctttgagctttggtcaatgagccgacgtgtcacctgtaacggattgacggacagctttgagcgcggaccatgaggaggaagcggacgttgcccactccgctgccagcagagaacggcgacgttggctttgctcatcatgacgccaacggtcgacaaatcctccggctagagcaggatccgaacctgcaaacgctcacaccgcgctcgttagcgaagaccatggcggagctcgacgctctgaagtcccgcgtgctggagctggagcagcaacttgccaagcaccaaatcgaagctctcactccgagtaaagccaagctgccaccactagcagatcctgttgccggaccgaatgcggagctggtaagtgcacctttggtaatgctgctctatcatatttttctgacgtatctagtgacgtgtcttagcttcctgctgtaggacttcagatgagcggtgtaaagtccacctgcgagttgaaaactatccacgctctcgccggggtctctacgatgagtgatcgaattgctacggcacccgccgctacatcacgaaacgtggttgcgatacttccgctggggtctccacctgctggaattcacaccgaagccgcgacacctcgtcaggggaaaactatggcttttgttgccagcagccctgatcttgctaatgatatcagcccaaccgacgtcgaaagctctgaagcgaacgccacagcggaaggtagctgcagcccttctgctgcgtccccgcaccacgaagagaccaagataacaatcggccatgaaggagaagcggcaactttcgcaatatcccagcgaaatcgattgtaccagaacctcaaacgccttagcacgattgcgacgatcccggaagatgaggtgcgttggtgtgtattgcctgcgcgtaatacagtgtggatgctaacttgattcgtgacgactttgcagcttttgctacttaaaaagttagtggacgctgaaatcggagacgtcatcaagttcctgctcgagatcgagtcggagccatccgttgctgtcatccgcgacaagctctcagttcttgtaaaggacggatctccatccaagcaccgcagtctagttcgaccagcgctacccagtcaccatcccgtttggagcatccagtacccgctgctcaaaattgctcagaatctggagcacttacaaggctcaagcgctgattcagaggctcctgcttcgtctcctgcctcttcgccgtccaagaagaccgacgtgatcgtcctggtctccagcggagcgtacaacccgatccacatgctccacattcgagctttctacgtcgcgcggcaatacgtcgagtcgaactacaagttcccagtcgttggagcgttcatctcgccatcacacgacacttatgtgcgcgccaagaatcgtcgcaatcctcgcgaaatgatcaccaagcgacatcgattggcgctgatcgagactgccgtggcgtcttcatcttggatcgaagttgacaaatgggagatcactcgacgacgagtgctcgactacctgagtacgttgacccacgtccgtgaaatgtgcgagtcgcacttcccgcggtaccgattccatgtcatgtacgtctgcggttgcaacacggtggtcaaacttagccactctgccctgcgagatgaaggcttcgggtgcattacagtgtgccgacccacacaaaccgatatggtgatcaagcacctggggaagacgctgtcaaagacgacgacaatcgtggaagacacaggcgttctaccctgcgacttggagcgagccacgagctttcgagtccgacaagcactcgccaatgttgacgcgaatgccaacaagatcgagatgatggtagggaaaccggtgtttcagtattttatgaggcacgagatcggcgagaaaatcgctggcaaggtgagctggaccgaggaggacaaacagtggcgacaggaagacctcacctatgtagaatacactgagagctagggagctagctagaaattgtaaacattgaatttggattgaacacaaaaaaaattcacgaagggagggggaggggggggtcctctacaaagtttcgtttgctgtcgacgtgctgtcaacttttcttattgcgacggagtcgagaaggtatcttccacttcattctgccccttgaggggttgctggttgggggtctggtcggcatgatcatgtcgtcagagtccagccaatcgcttggcggggctcgagtcgatcctcggagctcgagtcgatctcggagctcgagtcgaaatcggggctcgagtccacgcttcctcttcagagccctctgcgtcgctcagcgggggtccggtcgacatgatccccgattcgatggcagcgtccacaatcaacgccgattcttgcagagcccggcgcagatggaccatcttcatctcggtagtcgcctcttgctgacgtacttcatcagggtttgagcttgaagttacaggcagcgccgacagtagcgccaccgccaccatcagcagtgtgaagctgactttcatgttcctctcgaagtgtatcgtgcatccttgctcgctaaatgcagaatgagcaaatcaacgcggcgagtatcggcgaggcatgccactacagtaggtgcaatgtttcttccgacgaggtgtctacatgtgtagtcacgttgaggattatgcagacaggagagtacacgcagcggtcggcccaccggtcgaacatacaccagacaagatagtatcgagctcgaccagctcgcctatccatctagccaccaagtgcctcagttgcgtccggcagtaatacaggttgcgtatgaagcctgtggaagggcattttgcgtcgacataagattgttgcgcctcttttaaaaaaaactggagtgcaacgatacacttttcttaagaaaaaaaacttgtggcgaatagtaccgaaaatcgctgagtccgcttacgatctctggaatgatactgtatgtgtctacatgccaatgaccatacggacctcataaagttcaccgcaaggcgacaaatagatgctgtgctcgcttcgagcccacgccccaccacagtgcgcagtaccgaggcagaatgacgtcggcgaaactgcactttgatattttcttgaatcttcatgatatgatgccaaagtatcatgaaaggtgatcaggagagtcaatttggtccttcgttttgtaggagataacagtttattccaaggacttagtttatccaaggaacgaggattaattgggacttcccctagagttacgcgaatgcgtaaatcattgcatttattgcgttttaaggacaaaagtgatgtgatagtgacacttttcaaacaataaacttgccatgattgacaatgttttcatagcaataaaagatagtatatctcaaaggctggtggctcgctccaggttgcagtatcaggactcggaaaaattattattccactgagacgtatcgacttactgaaacctagtcagcgttagagcgttcgtctagccatcgacgacacgtacgcgcgagataagaatcgtcgcaacccttgcaaaatggccaccaagcggcatcgattgacactgagactgcagtgacgtcttcatcgtggatcgaagttgagaaatgggaatgagggtactccaaattccgatggtagctggtcgatcgaaactgtgattattggctggatattcatcctttactacacggatagcttgtcgcggatgacagcgacggactgctccgattcgatctccaggaggaacttgaaacctgtgtaaggagcgccgggttgacacacagcttgttctgaatacaatcatttccagcatgcctatccattgcagttcttgaaggccgttaacgcctacaaattggcgcgattgtctcatggcaaccgagattaaatttacagcggtaattactttaaatcgaagcaggatcttctaatcttctagacatgcacttgccaatgtcgctgcaaacgctaataaaatcaagaggaagacctcacctatgcagatagaatacaccgagagttaactagaaattgtatctatgaaattggacaatcaccctaaagacatttcattgcggagggggatgaatccgacttcttttatggcttcggtccccctccttcagcctcgtacgtcgcatctaccgagttgctttcagcgtcttccgacgattcgtcactctcgtcatcaacactctcggacgagtcgtcgtcgctgtcggaggcgtcggatgcttcgtcactgtcgtcgctgtcagactcgctgcctgcttcactctccgtgaccgatgtcgactccgtcgaggaagtaccggacgattcctgcacgctctcacttgccaccggctccgcatcactcgtcgactgtgtgactgcaacactagatccacttgtagacttttcagtcttctcttcgttttcttcttgttcggtctcgtcggcttctgccgatgacgcggtcggcggactcgtcgtcgactgcgcgaccgcagcactagacccgcttgtgtacacttctttattctcttcttcttcttgttcgacctcgtcggcttctgccgatgacgcagtcggtgcactcgtcgtcgtcgtcgtcgtgtgctggtcctcctccttctcctcctcgtcaaattcttcctcttcttcaggcacatccgacgactccgacagattcgttggtgccttggtcggcgcgctcgtggcttcggtctcgtgttcgtcttcttcttctgcctgctcgttgaattcctcttcttcttcagagaccaagtcgctcgacgcgtcgctcgtcggcggggcttgggtcgtcttgtcctccttttccgcctcgtcaaactcttgctcctcttcagcaacagaatccgcgtcggagtcagcagattccccttcggcgtcctccacttcggcgctggcgtccacaatcgtcgcggattcgtgtagagcccggcgcagatggacccacttcatctcgctagtcgccacttgctgacgtacttcagcgctcgagcttggcagcgccgccagcagcgccaccgcgatcactaccagcaccgtgtagctgaccttcatgttccccttgagtccttggtctcttcctcgccagattcagaatgagcgagtcagcacggctagcatcggcaccggcacgccacccttagagtacagtagttgttcgatacatggacatatggcgcgaagccgtagtactgggcgtctgctcgtgtagttacatcgaggatgaggcctgagagcagacgcagcgcagcggcccgcccccggtcgaacaaggcaaggcaaaatggtgtcgagctcaggagctgctcggcataccagtagtcttctccgtcgaggagactgtgcggcgatgcgaccagcgtcaagggacagcgaaaactgtcaagcagagggcgatctatccattagatgcccccgccgtcggcaggaacgccacaggttgcgtattctgccggtgaaacggcattttgcgtggacataagattgctgcacgcctcttaaattgccgagtgcaccgccagcttcgagacgaagagcacaatggaaaatcgctgagcgcaggcatgcaggttgcgtacgatctcaggagcgatgcagtacagtaaagtgcctccatgcacatgaccgtccgagcggggcggatgtaatcacggcaagacggcaaccagattgctgatgtcggagcttgcctctccgagtgaactgtaccgatgacgtcggcgaaactgcactttgaattttcttgaagggccgtttagctgctttacgtggcaaaatatgatacattttcccatgaagcgatcgaatacagcaaacctgcacagcaccgcaggaatgatcagctcctggctggttgggagccccgacttgggacgcaatcgcttcaggccagcgggggcacctcggcgccgctgaattgctctggcgacaggcgcaaagttgtccggcggcctgaatttcccgtgctcattcggcagagcgccctcaagaactgtgcggtggataagccccgctccaacgaagcgctgcgtatttctgcgacttgcggtacaatctcgaaggcagtattatacaagttctagcatacggcgctgagcaggggctcggagtccagacgttcctgcaaattgcagcgagatgccgacgtttaacgccatgagcgactcaccacctcgcacttctttgctcgctattcgctttcgctcttgaactcgcgcgccaaatcctctaatcgaactcaaactagcccgaagttacggtcgcatctcggtctcccgctcacgattaagtgagatcagtccagcgcttccgccgaccgcttcccaagaagcggcataggtcggtcctccagccggcagcccggctcggctcgcgaaatatgttaagtggtttggtccgggcccgactcactttccaattcgtcacggacccctcacgctgttcgtaaagtaaagcagctctcctccccacttcagccatgcgacagcagcaaaacgaagccaaagccccgcgcctggctccgcgcgttcctcaagtggcggccgacgccgccgcggctcggggcccgcgacgcaaaaaactcaagtggcgcacgcgcgaccagcagagctcgcagctctacaacctggagctggatctgcacgacctgcgccaggagatcaaggcgctgcaggagtacgagcaggtgctgcgcacgcacacgctcaaccagcgcgagacgctggacgactactacctcaagcgcgtcatgcagtaccacaaagtcttcgagcgcggctacaacccgcactccgacgcagcagacaacggagcgctgagctcagaggacgcacttgagttcactaaacacatgatggacgaggaggtgtcggtgggtcgcttcgtcggctatgaagtgatactggaccagtgggcgcgctacacggcggcgttcccagagctgcagtgcacgctcacacagtctcggatcgcgtcagcggatgaggtcaccatcgtttcgaccaccgccgagtacacgttcgagatctcgcagacgacgatccagacgctgttccccgcgatccgctccgagcagccacagatcggagccaagctggtggggcgaaagttccaaggcgccggcgtgtccacgtttacgttcgacccgcagtcccaccgcgttgtgtgctacgacacccgagtggacttcttcgaggtgtttgcgagtctgctgcaagactcgaacgagctctgcgtgctgttcgagggcgcagcaatcgccgagcaattcttcattggagacactagctgctaccccgttctccagctcggcgacgatgaagagaaggcgcggtaccggatctccatctactcggacggcgggcagcagtctcccgcgctccacaagctgcagctcggccacatcctcggcgcatgatattccagcaatagcgagcctttgtaatcgctctcgccaacacaacttactagaacttgagcttcaccttcagctggtcgaagttgcatcgtctccaagagatcaagctgtcgtagaattgaacgtctaacctctgtaaaagcacaaaagagttgggtccagccgcgtctgaacgactagtcaacaacctgtagacgacgttccggatttactcatggctcgagttcatcgccttgacacccccaagaaggtaggtactggataccaagcgaggtggacacgatgcaaaaagtcttgggaaacgaagccacccagcactcgcgccggccggtctcacagtcgacaagtgtaacgtgaggtcgcagccgcaactctcaacctcgcgcatctttgctggcggtgggatgaatcaatcgaaagaaaaaccgaccgaagcgaatagtgagtcttcttggtccggccgcccgacagccggagctctgggatcagttgcgaacttgcctcgcactacagagaccttcgcccctcccttcccagatgcaaatgcacacagccaactccatcgccgagacgttcgacgtgacgcccgtgcagactcgacaggtgctcgctccgcgcgtgccggccgtcgccgccttagctacggcgagacgcgctccatatcgtcgcaagaagctcaagtggcgcacgcgcgactcgcaggcgtcgcagctctacaatttggagctggacgtgatggatctcaaacaggagatccagcggctcgtcgactatcggcagatcctcaactcgcgagccttcaaccagcgcaacgctgtcgacggctactacgtcaaagtggtcatggagtactaccgcgtgttccagaagggctaccgcccgggctccgctattgacgcggtgcagttcgtcatgcaagccatggacgagaacatgaccattggacccttctcggggcgcgacgtgatcctccaccagtggcaacagtacacgaaagcactttcgggcatcgacgtgcgtttcctccggtcccgagtcgtctcgggggagggacagacgatcgtgacctgttacgccagctacaagtacgtggtgactcaggacacgctcgaggtgctgttcccggaggcgctgcaccgccacccccgcattgtcagcaagattttggggcgtgtgttccagcctgaaggccgcttccacttcatcttcgactcagagacgcatcgcatcgtgtcgttcaacttcgagctcgactttatgaaggaattcgcgccactgctgcaggacccgcgcgacgtgagcacgttcttccaggacgcgcgcatctcggaggagtgtttgatcggggaccatgcgagctacgacggtgttgaggctaagacagagcacgacagctacgaagacgcacaggttgaagataaggcggcgttccctctcgagtacgaggagaagttaccttgggggtacgacagctacgaccaggagcaccgacagccttcgcccgctggtcgagtcgcgctgaatgatactgcagacgacacgtactacctctaggatcaaactgccgcatatataacgctcaacgcttttgggtccagctttgcccgaagctcgagctcttcgactcgtcaactcgtgaacacgacgtgcaggattaactcgtactcaacttgatcgcctattagctaatagctaccccaactagacgctgctaaaagctttcacatcaacacggagtaaggcccaactcaaagctaacgccgaagccaagactggccacgcgggcaagtgtaatacgagtgcttgccctcgcgcatctttgctggcggtgggatgaatcaatcgaaagaaaaaccgaccgaagcgaatagtgagtcttcttggtccggccgcccgacagccggagctctgggatcagttgcgaacttgcctcgcactaacagagaccttcgcccctcccttcccagatgtaaatccacacaacgaactccatcgccgagacgttcgacgtgacgcccgtgcagactcgacaggtgctcgccccgcgcgtaccggccgtcgcggcgctcgctgcagcaaggcgcgcttcttatcatcgcaagaagctcaagtggcgcacgcgcgactcgcaggcgtcgcagctctacaatttggagctggacgtgatggatctcaagcaggagatccagcggctcgtcgagtaccagcagatcctcaacgcccgcactttcaatcggcgtgacgcactcgacggctactacgtcaaggcagtcatggagtaccaccgcgtgttcgagaacggataccacccaggctccgctattgacgctgtgcagttcgtcatgcaagccatggacgaggacatcgttatcggccgcttcgccggacgcgacgtgatgttgcaccagtgggaacagtacacgaaagctctctccggtctcgagttccgttacctgcgttccaaagtcctctccactgatgatcagtccatcgtgacgttctacgccagctacaagcacgttgtgactgaggatacgctcgaggtcatgttccctcaggccatgcgccaatatccgcgcatcgccagtaagatgttgggccgcgttttccatgacgagggccagttcaacttcacctttgataccaagacgcaccgcatcgtctcgttcgactttgagctcgacttcctccaggtcttcgcgcatttgctgcaggacccgcgcgatctttgcgccttctttcaaggagctcgcatctctgaggagtgcttgatcggcgattgggcctgctacgaagagcgggcgtgtaaagtggaggataacggcgtcgatgacacggaactctcgaagagaaggcggcatgtgacatgccgccttctctaaactaggggggcacccccccagattttgggaagacatcacacttagccccctatttctgagctgtcggatcgacgtactcccctatttttgagccgcatacagacttacccccctgtttttggcccggcccccctcagattcacatgccgcatgtccccaatgtggagtaacgaagcgcgcgacgaggagtatcgacgcccttttccggctgggacgagcaggtttgcaatggtttaactacgtgcagctagaacaattctgcgtgggtgaacagcagtgaatcgctactatgttagcgtacgtgtgaaaaaaaataccataccttccattggataatgcgactgggtgatgtgttctaataataagagtgtcgtagttgcctcagaggcagcgagagcggaaaccttagacggcatcttgaagtggaagggaaacaactgatagattgcatattattcgattagataggttttcaaaaaaaccagctgcgcagtttggacattccgacgatttattctagccgatttatttttgtcgtgaaaaaccacaggtccaaataatcgatcgactttttacttggacatcgctctaatacatgtacgccccagctcgcatttgcaacaaacttccgacggcccttcaatgccaacgcgtaacaaggagagcattttatccgaagctaacgagaacataccagtgatcctgagccgagcactgtatcacgcagttggataacgtcggtgatcacagtcttacacgttggcaattcacagtcttacacgttggcaattcacatctacagtactattaaatactatagaatgtgtaaatgtagttagttatactttgtgtgtaggtaagccataatagctagctttcgctctactcgttgtcctcctcgttctggcgctggagttcgcgatctagacgctcgaggtcgtcgcgatccagctccccactgccgtctcggtcaagtttgtggaactgggcgatgatcccgtcaatgtcgtcctggtcggccttgttgagcttcacgagcatgtagcacagatactcgagctgcgagaccttgccgtcgccgtccgcgtccatgtccagcagctctttcatgctgatcttggtcttcatcacggacctcgcactgagctcgttgaggatcgatccgatgccatgcgccaccgtcacgacagccagtgggaggtaaaagatggcgtaaatgcgagcgctcttcgacgtcggggacaggtctccaaagccaaccgtcgtgatggtgatcagcgtgtagtagaagcaatccagcactggccagccttcgatagcccccacgatcaagcccgctagaatcgacgcaacaatgggtacgaaggcgtggaagagcgccttgttgctgtccgagaagatcctacgcgcccaactgggtagactgccctggaaccgcttccagtaggttttggccttgtctctcttgcgaattctggcttccttgtcctccaatgtattagatccagtggctgtagccgcggcattctctacgttgctgagtagtttttgagtagccatcttggtgacgtgtcgttggcgttgaaggaaccaggaggccagctgacccagagccacaccgatggtgcagatgccgtagaaggcgaagaaaatggtaaacgctctccccgctgttgtcttgggcaccacatcgccataacccacggtcgtgacgatcaccatcgcgtagtagacgcagtccacgaccgtccagtcttcgacaaagtggaagacaacaatgctcaccgctatgtacgagagcacaaggcccagcgccaccaagttggatctcaacgtctcgtggttgtttttggcattttctgcgccggcaatgatcgtttgttgagccacgttcgtgatagtgcgagccgacatcatcggcaggtcaaagatggactgcaacgcaaacaccatgtgagcttgttgccggtaatttatgtattttgcaacaaacacttcaccttgtcgatacgaggcgccgttgacacttcagggacatcggtgaaggtgcttggggcatcctccgacaccgactcctacgcaacgttaaaggacattagtaccttaacttaccaaaggaatcaatgcttatagctgatctacgaaccagaccgggaactgcgatcactacatcagcgccttgaagttcgtctcgcttgtttgggctctactcgttcaaatgtacaattgttattcaggttatagtgatcatagccagcagaaactgcaggatcatcttcgtgccttcgccatcgtgtcgcgattccaccgcaatgctggccaggggcagcccgaccgactgcgtgacggatcaggtgcgtcgccgaaaatgaaaatacggtcgtgaacaaccgtggtgacgtctttttgcagtccagggaaggcgctaaatttaccgctctaaaatctctcgttttcagacttggttcgagaacgacaactagtgagattggagataaaatcaaaatcctattgtcgggggtatttgcgagagtctagactagacctccacgtctaatgcaccggatagtccgctgctaatggagcttctcacgaggtaactagttccctggcgctgcagtggcgttcgcggctggatgcccttcatgttgtagtattgcagtaattgtgtggggatctcagccaaagtctccttagctagtcgagcggggttccggcggaactggttgaaggggacgaattggacactgtagcaaaacaacaatacagttagacctctacccattcgtcacaacaaagacacagtctcaatgaacgtacatgtcacgcgcagcgcgttgccgccttgagtccaccagcaacttgtcatccgaatccaacgcgttcatagcagtaaagtctgcgttgcccacagcaacgatcacgatcgatagtgggagcgtcgaggcctgcaccagctcgtcaatcgtctgctgcatgtccatgatggcgccgtccgtgatgataagaagcacgaaatacttgagattgccaccgccaccttgctccgccggcgccgaaaacgtccttgcaatagccgcagcctgatgcaccagtggcgcaaacatagtcggcccgtggagctgcacaaactggaaggagttggagtacgcgctcataatgccgttgatgccctccacctcaggctgtgacggatcgaatgttagcgggaagcagtgattcacagctccattgaccaagccaccgaagccgtagacggggaagcgcttgtccgagtcatagggttccagaatcgcgcccgtcgcagagatggcagcttggtagtcgttcaactggccctggtagcccgctccagtgtagtgcagactcgaagggtccgatggactgccgttcgaggccgtgtagtcgataccgacgattagactcacctcgcatccaccacgcagatactcggcaaacgtatgcctcttgaacaactcaatctgctcgaggactagcacaccggagttcttgtaccgcttgcccttcttcgcctgtcgttcgcgattgataagctccatgctgcggatctctcctgtcacgaactccgccgccttgacggtgcaactgccgatgaactggtgcttgccattcttctcccagtccatgcactcaatcttcagtagtctcgacaagtttccgttgcacagcgtctgcacactcagcgtcgctcgacgccacttagggtcgcagtcgttcatcaccacttcactcctccagaccagactccaagacgtagtggttaacggatccgcgttttcgtcccgtaggcgataaatattcaggaacgggtccgaggctccgaaccagccgtccttgttgtccagcttggtccccgtgaaccgaacgttgatcatgtcggcgcaggtggacacttcttcagcgtcgatgaccacgtgccccgacagattgtgcacgtgccccctgtccctgtcgttctgcagcagcctgagcacagccgactgtcccttggaggacatcaactggcccatcgtgatctccacacagccgaggaagtcgtggtccgcgagtcgctccgacgaactgtcccggtcaaagacctcgactctcagtctctgtacctcttcgaagaagaaatccacctggacactcttggcgaacgtcgggtcgggcgagttctggatggtctcggtgcggccgacctcgcgccagccgcgcttctgcgcctcctgcatgtagagcacgatgaaggggtcggactggctcaggaagtccgacttcttgagccccttgcagcggaagcgcagctccacgatgctggacggggtcggggccaggccgtcgggcatcagagccatggaactcctcgacgactcgaagctgccgggctgcacggggccgtagccgccgtgcaacgtcggctcgcgctggaatggggcgggctgctgctgcacgggggcagcagcaggaggtggagcataattctggtggggctgagcgtaattctgctgtggctgcgggttgtgctggccgatgtccgggtagaggctctggaaggagccgcggcggtccgtgggcggcgcctggggcgtcacttggtagccggagctgcggttgtccacggggggcgcggacggcgacgagagcgagcgctcgcgcccgtagtacgtcggcggctgtgcgtacatcggggagaattggggaatgagcgtcctcagttgacttgatgcagcgtcttatgctctgattgggcgattaatcacccgaatagtgaaccctattagtttcttgagaaatgaaaatatccacgcagcaaaactgagttttgccagttgtgcctacactttgcgtctatggtggtgccttcaatcagcaagttgagttgattcgcagaatgttggtgtgttgcatgtctgagtcagtggatattggtctagttggacgagtacactttgaccacgacccgccgctgccgagacgtgaatgcgttggtgctcagcactgcgagcaagagagcgactgcactcacggcgcaggtgatggaggcgcgctcggccttgagcagaatctgctggaaaagctcgaacagctcgttcagtgcagctcggaaccaagctgtagacgaaaagagtcggatcagatgatgcagaattttcggtgggggcaaattgattcgtaccacagttgccgttgtagttgcagtcgccgagcttgctggagcggacggagtcggtcacgaactcgaccggcatcttgagctggaactcggcgtcttccattgcctcggtcttcacccgtaggtcgtctatggcagagagttgtttagaacgggagggtctacacgattattattctatcagacttaccgagaaggggatggattttggcgatgaagctggagacggcagcgacgtaagattcgagtttctgcttctggaagtacaactgcgcgacgaccagccattcggattggatatccttgttaatggagactccttcgtcagggacgccccgccagctctcgttgaagacggtctggatggtcaataggtcgtctgcagtcacaagctcgccgtcgccgtctgggtccattagcgtttgtactgtcgagttgagcaagtcttgatgaagtgttgcattgtagggagtggggacatcggaatctgacaaggccagcactttaagttggtcgtagtgggactctgcaaagtcttggctccatgcaaacagctcgactaatgcttggtccgaatccgcagtaagtttctccaaggcaaagagtttcggcatgtcatacaacgcagtgaagctgaatcgatcaggatcatcgttcgctggcgttgggtgtggcgggacgcgaatggtatcgctgaatgccagagtctccaccatatcggttgcctctacgaagttttgatcgaagagaagcctgttcacatcctcggcagactgtgtagaaggcagaaaagcgtacgtgttctgatcaagacgttgcaggacgattatcgcatcctgcgccatgacactcatagtgtagagcagtccgacgagaatcagagccaccaagaacgcgatctcagagaagatgcacgcagcacgcccaacctttcgccgaccggtcaagattccatgggcgaaggcgcttatcgtaaggataaaagcaactccgcacaggccacagagagcgtacaggccgaacagtgagaattgtcgaatctcacttgcaacagtgtcgtacccagaagtaagccttccgttcactacgaggaagtcactgcacataaggtgcattctgtcgaggaaactttggattgcaggcgtgagtgttttacgtgctaaactgaaatcttcaagctggtgcttagccgtaagcatgtcgatctgcacctcaaaaatatttttacgccaggacgtcttagcttcagatacgagatccacgatggttaagcacgttttgcacttgaagcagcccgtttgtcctcctattgtcattcgagagagttcgctcggctgcgtaatgttcatgtactcgcagtccactgagtcgttgttgactgttggataaagcacagagtagctggtaagagggtcgagaagatcgaacacgggattgcctatgacgtcctccgcgtagctctgcttgtccaagaatacgtgcaattccaagtctgtgagtgaacgttcctgaatgtctggaaggaggaacgattctccattggagtcctcgtatccatctgcgaggagttcatccattggcgacaggaagttttcctcaaatgtggacaaattacttgggaatgtgtcgttcaggagtgtgaacacttttgctacaagcggttcgatgtcgttgtgcagcacgaacaaagtcatgatagccgtcgccgagcccaggaggagaaacaatgtcatgaaagtgccccacacaattttctgcagcttgctgtagatttttggcttctcgagaggattgcgccgacgacacccgcatttgaagaaacaaaatgtccacaaaagatgaaaaataaatgaaatcgcaaaaaatgccgccgcgaggacgaagtaggccgtcgtagcccagccaaactgccggtaggaacccgtttccaaaatatcgagaaatcctgacgaagtgtccgatgtggaagcactgctgatggctgagtcgtagtcgaatgagagtaagtacgcacggaggtctggtaacaaatggtccacagacgacaagttggttgcgttcgggaacacttttgcgttagcaacctccgcgatgtcatacactgcgcaaaagcaaaggaagtaagaaaacattcatcgacctcagcctgcccaacagtctccttaccgctgtcctggcagtgatcacctgtgaacccccagcgtttgacgcactgacatttgcccgacgcgtcttcgtttagtgcgaggcactgccctcgttgttcgcagcagaggtaatcgtagtcgttgtcgatcgggtaactcgtgccaaccaagcgcccacttctcactctccgctctccaacctgctcattcagcgctgggtcgtacggaaacgtgagcgtgcacaccggctgcgggtccgtcttgagcttgatgtcccagatgaacacgagcgaccccgtggccagtttgtcattgtacgcgtccgcgcgcttggacgaggagcagccgccacaacaggcgaagttcgggtcgtaatgcgccggtgccgcgcccgtgatcgtcatccgcgctgcaagtcaagaatgggtctcaccacgttgaagtcgttctaaatgtagccattctaagtttcgtaacggttaataacttgaatgtcacgctaacgtttcatttctgaagtgaaaattgccaaaaccttatcggagaccgtgaaattcaggaaccaagccgaggcccaaggcaatgctgctggagctcgcggacgagtgcaagcagcagatttggggctttctgggcgtgcgggagctctgccgtgtggcgggtgtggctcgcaatgtcgagcagggagttcatatggggccgatctggcagcgacacgctcggacgctgctggccaaaggtcaggccgcgcttcgaggcgactccggagtgctcagctgtcggctgcagcgaggcaatgccagtcgcaacctgctggcgacaggagacacacgccgacccagttatggcgaggacggagaactattggaggttcataacgaaatcgactggagactgtggtaccgagacactcacgtggtgctggtgaggttccgaaccaataacgagggctttgcccaggcgttggcctccctgcaggagctgaagacggagcgcgcgcaacttaaagaggcggtgcagaacgtgaaggcttcgactcaagcagagaagaggagccggcgcagtcagatgaattgcgtgcgatggatgaaccgcacccaccgacgacaagctgctgcctccaactcgatccaagcgcagaatgcggcgctgtcgaaggcggaactggccgagagactgcagcgtgtagagagatcgattcaggcgatagccaaggagcagtttgaactgcgtaagcgggcgatgaagagcttgcacaagctgaacgcgcagcttgcgagtgggacgaagctactgcgtgatctgggagttcctgctgataggtatgtagcgtgacttcgcgcgtgagatcttcttgtaaatatatacgctagtcaaaattctaccctagattgcgtcatttaccacagttttgtggactctgctacgtggtttcgataggctcctacgttgcaaaccttgacgtttgcaagcgcttgccgagcgtattcgctggaattcaacccagcattctacacaaatagcagcgtgcaggttagtgcgatgcgtggggatcaaataacgagactggttggagcctacccgcagagcaatccccagcttgaatcgtgcattcttgaagagcgtctcgcagtcgtagccatgactgggaaatagtcccgtttcctaaatgtttggagcggtgcaataatgttagatacccagagcaaaataggaacgggacagtgaacgtacggtgagtggcaaaccctcttgagcagcttcaacattcgcacgaaaagctgcagtctcttgtcgggtgcgttctggatccggctaaacagggggaaaacatgagtaagttgtagctcaaaaattccatcagctttactcggagtaccgttatgttcgcgatgatttgggcgtacggcgtcttctccttcagctcgctcaatttcgctaaccgctgctcttcgagctgggccttatgaagctcttcgagtttcatatcctcaagtttgcgctgacaaaaacgcacacgaactgtcaagatactatgcagcattcatcgagatggcttagcatcgacaaacctggagttcagtttgacgatactggacccgctcagcgttgacaacgctttgaagtgctcgttctgcttcacgttgctgctcctcctcgatcgataacttttcatcagccatttttcgaagaactttatctttcctgcaggacacacgaatgataaatgtaagatccacgtcactgttgaagcaaactaagatgccgtacttgtactcgtcgacagcgagcttctgctgatcgtgctttcttttccgccgaagcgcctcttcttgctgttgctgagcctccaccatctcttcaatttcacgctgctgtctctctatccgctctttggcttctttcgtaacgtgccacttggaaaccaagtcatgacgttgctcgcactgctcctgcatttcacttaactgctgtaatttctgaatcctctgctgctcttgctcgatggcgactcgaaactttgtagcagcttcactctgtaactcttccaacctccgctgcaactcacgctggcggtccttacgtttatcatggtaaaaccgaagatgctggtggaagcgtacatgcttcttaatatccgcaagagagatagtcggtaggaccaaagcgacctgatcatacagcaactgcggcttcttgccagtgtcgagcttcttctcgtaactgcggagaacttttagaaatcgttcctcattcgcgtcacaccagccgccgcttttggatgtggcagcttcaatactacctgcagcatcatcagcagacgcagctctgacaaattccatctcatactgcgctagatcatgacggaattcggcgtaagcaatacgaaaagattcaatcacctcgattcgcagcaattcgtcagggcattcattccctcctgtggcgtcgagtactgtagtgatcttctgctcttgtgcgtcgaggttttcggctctcgctggcactgagtttgcctcgtcccgaagtgtctccaagactttccgatagcaagaatcaaactccttttcacacgactgcacttcttcctccagagtcgcttccaccatttgcctcccgatcactgcatcgtagatcagctgacgcacattggcctgcaaaaaataatcggatcgtgagcagcaatttcaagtctatggagatgcagtgcagcacctgcatgtcttccgacagcatttgattgttttgctctagatgggcgccttgtcctttggaaaaagctgacagaagctgcttcagtgccgctctctgataaataagcacatacgtatctccagtaaatggacttgtcatcgttaaaacgagaatgtctgcttacttgctcgcgctccgaggcgatctgctttatcagcgcaattcggttgagctgttccgctcgaatcaaatcttccaactccgcggcgtagattatactggtagatacgaccgatatctctgacggagtcgagttattgtctttttcgtcaccgttgttgtcttcgtcaacatcgcgtgtagaacgaggcgtactgacgctgcacttgcttggcgtatcctgaggctccagtttctttgactcgtgcgctgtagatgcttcgttgtacatgcgtagaagcatcgactccagctcctttgaacaattctaccaattaactgagttagagattgcccaacaattgtaaaatagtagggagaatcacgtcacctcctcaagcttcttcaggtggctgtgctcttgaagccactcaaactgtaacaacgcggtgagctacgaagcgctgagatgaccgcttggacggatttaccttcagcttgtttgccttcattgcctgcttctgagtctttgaagccttcttcatctgccgaatggactttacaaggcacgactttaagaccaaactcagaccgcagtaaatgccttcagtttgccaacacttactttgaggacatcgtcaccttccgctttcaactgcgaggccacctgcagctgctggtcgatcgtcaggcctgccgtcgcgcggaacaccttctttcgagtaccagctttggatagcaacttagcaggcgtcttagagtgcactaggtgctcaatcagtgcacgtacctgcggggactaccgacctctttgttgtggccatcaccaatctgcacgcgaggtttcgagtcaaaaggtcgcaaaactaaaaatgcggcattgcccttgacgtctcaaaatgcactcgtcggcataaagggaaagcaattatcattgttcattgtggtgcttctgacttgtgtgcagcaaaccgtcgaacagaacgcaacagatgtaagagagagggcgcttctagcgcgtgcccgtgcgggggcgagcgaatccctcctccttggactcgtccatgtagtcctcctgctgcgtgcagatgcgcaggatctccttcttgctcgactcctgctggtagccgccgatgaacagctcgtccagaatgtagtacgcctgtcgccaagcaccaccaaaaccagcattagacccttaagatcacaggcgaaaacctgccaagacgacgctctaccttgtggaagttgaagatgatgtccagctcgcacacctgccatacacagcatccctcaatgtgagcctccttcccctccgaacctccggcatctccctctggcgctccacgtacattgccgaagtagcggtcgagcacctccacgaagaggtggatggcctccagcgtgatgagctcgttctcgtccttggagatgcacgcgatgaagtacaggctcgcgtatctgcgtcaaggcgcacagcacagcacagcacagatcagcctccctccctccctcctagttggcagctataatagcaggcggcacctcttgtagacgatcttcttgtccttgaactcgatgaagttgcactgcttgtgcgggcgcgagagcacgagcgacgtgatgtcgcggatcatgcgcgtcttctccttgagcgacgcgttgaggtaccacttggcgaggcgcgtcttgccctggcggctcaccagcagaacagactcaatctgcagtgcgcatacagagatggcatagcgttagattgcgtcagggcttgctagcagacgcacgcagcctcccccgtaccatgggtgctagataaacttggccgtggggagccacgtcgtcgggttggggccagattggtgtacaagacactaaatatttattatgctcctcaactgcgaggaagtattatcttgctcttcaattgtgagggagcttgcgctgttcaactgtcgctgcctcgtggcgcctgccaatcagaatcgaatccgcccgccgccatgagctcttcgtggctgctgctcccctcgtcgcgacaggtgcgtggcattaggcgaggagtccaccgtcttgcctcgccccatattaatccctctcgtccgctgtcgcagctccgccgcctcatgaccgacgccgcatcgtcgccttcgggccccgtggctcgccgcatccacgagaagctgctggccgccttcacgcccacgcacctggacgtgatcaacgagagccacatgcacaacgtgccacgcggcgccgagacgcacttcaaggtggtggtcgtggccgagcagttcgacggcaagccgctgctgcagcgccaccgcatggtgaacgccgtgctgcaggaggagctcaacgacggcgtgcacgcgctcagcatcctgagcaagacgcccaagcagtgggaggccaacgcgcaggtcaagccgtcgcccaactgccgcggcggcatgaccacggacgagaccaagaaggagttcctcgagagcctcaagcagaagcacagcagtgagtgaaccattccaatacagagccccctcaattagttattctatccacacgaccttcttagcgcgaccggcgcagctggctctgcagcatgttgagcatcacggacagcaagccgccgatcacgacgcccaggatctcctccttgtgctcgtccaccacggacagcacgctttgcacggacgcgggcagctgcttcttccacgacccggacaggaagttgctgcgcgagacgcggtggccaatctcctcgggcacgcacacgtcgtgggacgcgatgtactggtagtgcatgcgcgcgaccgcctccatgagcgccgcttcgatgtcggcctcgtccttggggcgcgtgatggcgcgctcgtccttgtcagtgatcagcagcacctcgtcgaagcgcgagtgcagctcgttggcgaccaccaggtgcatggcgtacttggcgatggcctgcttggccttcttgcgcaggatgtcccagtccgtctcgagtttgaacgacaccacgaacgactgcggagcccacgagtgccgcagcacgcccagcatcttgggcacttgctgcagcgtgagctccaacggccccgcgcgcgactggatcttgtgctccgacaggtcctgctgcgggatgtagaagtcgctcacggctgcggccaggaggaacagcgcgcgctccctccagggcgcgacgcacgtcgcgaccatccgcagcacgaagaagtagtcgtccaccgaggtgaagggcagcgacagcagcgtgttggctgcgcgcacagtccggagcttgtgcactgcgtccaccaccttcttcttggccgtcgggtcctccaccagcaggcgggtctcctggtcgcccatgacgccattgcgcacgtccaggtgctccaggaaattgacgtccagcgacgagctcgtggctcgctgcacgtgacgtgcgaagggcgcaatggatccgggtcggtgcacgtagatgactgcgtaacccagtcccagcaggtactcgacggaggcggcgcccctggagcccgtggagaagttgtccaggaagcgcacagtgttgcgctcgagcgggacggtcgtgccgccggacgtgaccacggccacgcacttgcctaccactcggtggtggtccaggaacgcctccacctgctcacgccgctcgtcgccccatttgggtgccgtagtgtgctggaagtattgctccgttcgacgctggtcctcgtccgacatgcttgattttggctaatggacggtctcctgatggatacgtcgacaatactatgatctgacatgatatgcggttagataggtcaagttgaagttgtggatcgattgaatgttacgcttttaacgctacggacagtttggccctttggctctctctctccctttctggttatgccacctcgacgggggacttggtctcgatgtacccggtggcgggggacttggcgttcacgggcttgtggaacaattcctcgatgtcctcgagcagaattccctttgtctccgggcagaagtagtagacgaaaagtccgcaacacacggcgagccccgcgaagaggaagaagacgccgttgatgttcaggtacgggaagagcttgacgatctccgtcatgagcgcgccgccgacccagttggcagcggtcgaaagggacacagccgtcgcgcgcacgttgagcgggaagatctcggagcagtagatccagggcaccgctccccacgacacggcgtagctgaagacgaagaaggccgtaccaatgcagatgaaccagcctccgacctcaggacacccggcgttgtcgacgttgccgttgcagatcgcagtgaagaggatggcagcgaagaggtgaccgatgaccatgcccacagctccgatcaaggccatctgacgacgcccgaacttgtccagcatgaagagaccgggcatggtactcaagcagttgactccactgaggagcagcgacgcgtagatgccggcacccgtgatgtccttgaagatgagcgagccgtaggtcataatggggttgatgccggtcgcctgctggcccagctggaacaccatggcgatgatgacacgtttgcggaccgaaggctcccagagctccttgagtcccaggtcgttggccgattcctgagcaatctggtcgccaatggcagccaactcgtgctgcacgttgtcggtctgacgcagacgcttgagcactgcctcggccttcttcttgcccttctgctggtatgtccagcgagggctctcgggcacgcagaagatgccgcacatgacgatgatcggggggatcatggacaccgcgttactgatgcgccagccactgctgttgtcctccaccaagatgttgatgaggttggccagccactggccgaacgtcacggggaacaccatcagtcccgacagacgcgcgcgaagctccttcggcgccatctccgagccgaacagaggcagcgagaacgacgagttgccgacaccgaagccctgcacgatacgcgccagatacatgagcgtgtggtcctgcgcggggttcagacagacccaggtcgtgccgatgcagaagaggacgccggccgacatgatggtggctcggcggccgaacttgtcggcgacgtagccgccgatgagagcgcccaccagacacccgaggttgtacaccatgttgtaccagaccgtgaacgtggtccactcgccaggcaagtccgcggacgagcgcgtgcactcatcgtacgtgaagttgtgccagcccacgcagtagtcgttcaggaacgagtccatgatcagcacgccggacgtcacgccctggtcgtagccgaagaagaagccgccgagcgacgcgaacgcgcacacgatgatggcgtaggtccggctgccgtcggtcggctccgtgtcggtggtgtgccggtcaacgggaatcaccacgccggcaaccatcgtcttgctttggcgagttgtgtcggtggtgcggtgcagttagtcgaatgtgtgcaccagggcgcaaaatggaaagtgaagtgagctaagcgccgaccgtctccagctcaaggaaggcattgggggttcgtgcagttagttcaaccgcgcatgggtgtcgtcgactcgactcattcgcctgccagcattgaacatggatcgccagcctgttccggatttgacaaatcggtgcagtcccgcccatctcgtggtcaggctatacagtaccgcttcaacatgagctgtatggaccatcgggaagcgcacctccttccataacttatggaccatatgcctgcattggcctagagatggacatttctaaaagtctgaagtctgaagatagtgggatacgacttcagaatcgcacgtccggctcagaagcactacagctaaaggaaacccgctatccgagcgcgggaagctttgctatacccttgggaaatcaccggcgtgtgaagcttttaagccgcaccccatgaaggcctgtacagtaatagcaaccatgattcagcacggtggtttaacacatcaacaaatccgcgaaaagctggtggtggttgaagttggcgcagaccgtgctggtcgtgggatgcacgaggctcgtacgtatgaaagtcacggtgctgctgcagcactgctgcagtgctctcatcgctcatgagacgcaaggttgtccgcggacagtgctggtttaacgtacagcattatagatcgtttcagtgctacatgaatgtatctatgtgctgggcaaacgatacctgccaaaacattaacggtgaccgtcacagtcatatcctcgctcttgtcaattcacttggatcgacgagcgcgcaatggcaaccgggcttcaaatacatgttaacttcaaccaccgccctggcacgcgtggaggctggaggctcttttttctcaagtaaaaaaggccgcgaagacaactttaagtcggtgcagacttcactgcagtacactgtacatgtaggtcatccccccgcttgacgaaagagtctgcctcttggcacttccttaccgggatgcatattgcgcacgcctggcagaatgaattgaattgcctgcatgattccaagctgagtacatcacctgtattcgaatgacgagtccagtggatgaagcgtccaagggtctttggcaggatgaggtgcttcgtacacgatgcttccgatgccaaaagtttacagcaacgcgggcgagtggtacgtttgtgccgagggcacgtagtctagtaatcttgctgatcacctgaaaggcttcggtttgagtcgtttgaaagtgtggaaatgtgcagtgtactgcatgtagctgccaaacgcctgaactccacgaccgaaagatcggtactgctcagccattgtgtgggtagtagctccataatacaagaccactcgtgactcgtggtcagccatgttgcctccaagccatctaggtagcacggctatcaccttcacactgtgcacggagatcaagcaacgcggctctcggcgaagcttttcagtacagtagcgggtgtccagatggccacgagcactaggtcgaccgtcacatgagcaggcaacaaacaccaacaaaggatggatccaccatgacggcgcctggaaaactcgagggcgagccaccgtgtgcaacttgtatgataacgataatagaaataaaggcaaatactacttcgggacatccacagattcactcaagagagagcactgcagtctggacattcgacaggcatgaaaggccctttggaactgttcactggtctcggtggggagcagcaggatcttggtggcgacatggcaggcaacctgctttaccattcctcaatttacttgggacagccacctcctgcatcgtcgaccttcagccgccagcatgcagatcatcgtgtcgctggtactcgctcttcttgcggcctcgagtacctccgctcaagtgacgtgctccacgttccacttcgagcaagacgctcagggcaactcggtcattgtcctggataactgcaacggtgctgtgtcgagcggctccactgtgattgccggaacttcagctacgaccggcagctcaacgtccacgcagcaggcacaagtgcaacgtcaacgtcaagcacggcgggaggaacttccacgagctccgctatcaactccgggccatccacagccgaagcctccagtgctccagctgtgacctcagggtcgagtaattccgtgacaccttcagccagtactgcggcggcggcgacgccaagcccacaaagctcaacggctgcggattcggcagtcacggcaacgccagtcgctgcgacgaccggatcgggaactgcagcctcctcgactcctgttgcctcaaatgcaccgcccagcgctgcggcggccgtatctgagactactaacggtgctacgtcgaatactccctcaacgtcctccacgaatggagctactggcgagactgctgccacagggacgggttcggctgcagtagggtcttcgacgaatgtagcagctatcgacacttccaatacggctgtaaatacggcagccccttcaatgaccggaactgaaaacgctgccaacgctgctacttccaccagtaccaccactagctcagccacaggctccgcagcgatgtctgggggtgctacaacgaattcccaagcgacgacctccacaacaaactcccactcacccaccaccggaactgcttcgacacagggatctcaagcgactgccagttcctcagcaacgaacaaagtatcggggagcaccacgacctcttctacgagcagttcgcttcgaggcgggtcttcctcaggcagcactgccggcagcagatcgtccaccgctgcagacagcagctccactgggagcgcaaccatcctcaagtcgactgccagtcagtccactacgagctcttccgtcggtagcactggccagagtgacagcaccaaccaggattcttccagcactgcgcagggtgacaacatcgtcagcggaggttcttccagcagctctggatctggcagcagtaacgcgggcgctcgcatcgagcggggtctttggacgtccgtggcatccgcgctgtttgtcaccgtagcgttgacgatggtgtaggcatttgactcgccgttagagagagaaatttccattcgcacttgtcaatcacacgcggaatgcaccaacttctcgattgccatgagacccaacgcccgatctcgctacaagttcagtctcgagcggccttttgagttcgtcagggcccttccgcgctgagtgttgctgcactccccggactcagcgcgtcttgtcggctaaaacaaacttgcgccattaaccaacttgctcgaagggggcatggtgcgcaaacaggtaaaacttttcgcagctttggtgctcggtctcgccgtcagtctcaccgctggcttggactctcaactcgacgacgcatcaaacggagcagaatcagcagcaacagcttccagctcaccgacaacagtgacgtccctgtgggctcaagttcatcgacccccattaccgacaccccgatcactccgcagccgacattccgcttggcgacaggcacgacagatcctcccgtgacggacagctccgccgtaccgtccaatactggcaacgatggtgccatatcagtatctacgactccagggtctagcgtgtctgctgtttctacaccgcagcccacgatccgtttagtcaccagcggagagatatcttcctccacgacaacagacactccagtatcgcctaccggtagcactccaagcactggcatgaccacagctccgaagatcacctctgcgccgcaagtaccatttgatgcagtgacaggtgaaaatacggctagaccagctacatcacactcccctacgtctccgtccgttgcagcaacgagtactccagcacctggaagcatcccgacctcaacgaaggctcccactacggcaactttgactccacagccagcgtttcaagattcaagcttgcctaagactaccgtctccagtggtgcctcatcatcaagttcgaccggccgctctagaacttcgaatggtaatttccaggatgcggtacgcaacaaaactgcccaccgcagcgagagctcacccgatggatcaacttcttctggttcaaatgctggggaccccagtaccaacagcagtagtgacttcggttcatcttccgtcgaaaatgccgaaagcattggcagcgagagcgacagccaagcaacgacgaacgcaggcaccactaagtcgcggtttattgtagcgatggcatcggcattcattgtcattctggtagcattataagcctcatacagtctagacatgcatcattcgctcgaaaagcttccaacagaactcagttcgattcagagagtgctcagtcgatgaagcgcgttcgacaacagcgatcggacctgagaactccagtgtcgacgacgatttctcacgtgtgcactctggccccttagccgtgggtttgggcgctactagtagcgatgcgtggcacatcataggttgttgcctcgtagtaagctgcgtctatttgcatcgactgccagcaccatcatcgctaaactgtaggtgtacccagtgggtagcacagcaccccctcgactcggcgacgttattgcgccgttgttgcatgcgccttcaagcgaccttcctagccgtcgtttgtcgtaagtcggcagtttttgctgctgaaatgtggctgtcgaaggagtcgctcggatcggatgacatctccgttcgctgtacagcgcgaggaactcattctcattccgcaactcacttcctcgagtacactgcaaaccaagacccaaacgacccacaagatgaagctcctcgtgtcctcggtcctgctcgctgtcgcgatcgccgccgtctccgctgaagacaactcaacggacgcatcgctgtcgacgtccggatcatcatcgtcatggtcgacctcgggctcctccgaaagctggagtgagtccggcaccgacgacgagaccttcggaccctccggttcgggcgacgtggccggctcggccaccgtcggtagtgtttggtctgcctccggcagcgccgacagcgtcgtggggaccgagtccagcacgtcgagtgggtcggcagaagacacgacgatcgagaccgaggcgccgactgactattctaccagcagcagtggcgaagaagaagaagacaacctctccagcgcctccgacagtgcatcgaaggcaagctccaagtcttccggcgcgaatattcttccgtcggttgcactctacagttccgccacgatcgctgtggccatcgcagccctcctctagtctgctgtaagtacagtagagaagggatccacactttttgattcgccgtcatagcagcagcagcaatgtaaatacacatgcgtgttggtgccaccattcacttcacacaaaaactcgattgcttgcttgcttgacctccctccaacgccagcaccagataacggcgaggaatcttagccccatgtattcttggctgcggcttccacggagttatcgcgggcgaaaagcaaaacgcttgccctccaagcccccacagctcgttcatgctcagctgcaccagtcactcgctgagccagaccattggactcgatcgatactattggagctcgttgcttcctcggaccgtttcctcgaccgtttccgcacgatgggaagctgtgattttcgcagttggagtctttgctgcaaaatggggagctccctccggtttcatctgtgcgttgaagacagcagctgtatcaaactgcccgaatttctcttcgtttctttctcaggtaagatcgttcagacaacctgtatacaaactgggcgcctttgacagcttgtatcgcagtgtgatagagattgctccatacttgtgttctcctgtgtttggtgtggagatttgcgtcattttccaacaaagtcgcttcaaacgaaagtccccaatttcgcggaaagcgtttccatgtatctcaaactcgttgcaaaacggtcaggaattttttgtccgttaccagctagcggtcgtggagctgctgccggcgcctccgatccagcgacggctgccccgatcctcattcgcacatttgcgctccagtactcgcatctacagcgtcccagtcgcctccgctccctctttccaagatgaagttcttcaccgccgtcctcatcgccgccgccatcgccgtccacggcgcttctgcgatgcagctagccgacaccacgacgggaaccaccgcaactacgaccggcacgaccggcactgctactacggaaacaaccacggcgggcagcaccgctactagcaccgacacgaccggcaccactgacaccaccaccactggcaccgacaccactggcactaccggcactactagcaccgacgctaccggcaccactggcaccgacactaccggcaccgacactaccggcaccgacaccaccggtactactggcaccgacactaccggaatggctacgacgacggatgccacgtccaactcgacggacactaccggaacctcgggtgtcactggctctgatgccagtggtgaggccccggagggtgctacgggctctctggaggcaagcggatccggcgatagcaccactactgtcggcgactcgtccaccgacggatctgtcggctcgggctccagcgctgccggcagcgtcgagccgatcacgtacgcagcgttggctctgggcgccacggtggccgccgccctcttctaagccagtcagcccacttttgacgggtcttgtccattaggttttatgctcgataatagcgaccaaacatcaattttctcccaagctcgctctccactccttcatttgtccactttgtgccaggtcacgtctgatggcgcatgttccccacgaacgagttgcgtcgagacggatgcggaggctcgaagttgtcgcccagttcggcctccttgagcctcagttcgatacgcgtcatgcccatggagatccgtcggccggtgccggcagaagacgtggtcgacaccaacgagcttgaggatccttcgcggttccagatcggcggaagcgacacgaggttggacggcgtacgagttacaggcggcgggttttcattcgtagcaaccacgtagttgcttctaccgcttggcgggcgagagctgggtgcggcaattggaggcagccgaggctcgtaggggggttctacctcggtaacaatcgcagtagttgtccctgcctcttcctcgtcatccgattcgtcgtcgtcttcttcgtcgtcattgtcgtcatcactattgcgttcattgagagcgctgactgcacagctctcatgcagctttcgccgagttttatcatccagctgcagcaacagactcgctcgcgaattgtagcctcggtagatggactggatgcggacagcggaatgattcacacgctccaggtcctttcggaagcgctgccgtcgctcctgctggacgttgaggaacttgcggatcttggactggatggccatggcgctcaccgacgtcatgtgcgccctcttctcctcccgcagcatcctcacctggccctgggccaagtgcgagcgcacgatcgcctgcatccgcacggcagccacatttcgcttccgctccatctcctgctgctccattttgtgcttctggagcagaacgatccgctggcgacgtcgctcttcccccactcggcgatacctctcggcggcgtcttgggtatcagccgactcgttcaacttgttcgccaggaggttcaagagctgcgcttgtgcaacagactccacggtcattgagcgtcggtgccgcagacgccgacggtaccgccggaaagcgttgataatcgtccgaacggcagcaacgcgacgcttgtgctccatccaggcacttcggatcgagtggtagtcgcatttggcgcgatggccacggaagacgcgctggatgttgaccacactcacgcggatactgcgtacgaacttggtcacgttgttctgcatctcgtggcggtgtcgatgcgcgaggtactgcagctggatcttgcgcgccaggaggtgctcgacccgcttctcattgttcttgcggatcattattttgcccttgagtttgttcgtttcgccccaccgctggatgtcacgcagctcgcaatcggcctcggggtcgagtagtgctgcgcgcttctccaagaattcgcgcagacgctcaggcttgatacgcaggacttcagtcgacgcagcgtcttcgccagattgattaccagacgccggtacagcagcacgagtcgtgtcctcctgacgaatacgaagttgctcgccaagtagatgggcagtcggcgactgcagctccatcatgttactcagggtttcctcaacgccaccagcagatttgatcgtcgcgaaggggtcgtacgtggtccgagctcggtcttcctcttcaccgcaccgttgtcgctccaatgcttcaagtttaatctcgttgtcgatggcctcaatacattgacgcagtcggtcgagatcggtcgctgatacgctcggcttggtaggcgagttactaggagacttggttgagataccaagcgcttcttgcaacctcttcaaccccatcgagttgacgcaacagaccttctttcgttcacgtgaaacagggggcgtgctatccatgcctcgatccgtcagaaatgtcttcccagctgacgaggtcccgagggcttgcagtgtcgcccgtgacaccagtagggggctatacgtcgcctttgggccgataatcaactccagcgccaccgaaggaaacagcgcgcgcaagtcttcgtccacatgcaggaggtagttggcaatcctttggcgtttccacggaaatcgaaagagccgctggaagttgctcatctggcgccgtcgctggcgcatttgacgccaatccagaatcccctccacgatactgagagtggcttgctgcaagccgttcactagcagtctaacgtggtggacgtggtgcttcattctcttggtgaggtcggctagccgagctttcgcctcggttactgccacctcagcttccgtgaccgctaggtcagcctctgctcgtgtcggggtaggaatggtcagaccgatcaacgaccccgtcttcttcatgcgcgatggagacatggccttggccgcctccaacgtaacttgcgcctgtttgtgactgtcttgagctttcagaagatcttgagccagagtgtcgataagaggcagtacttgcttcaactggcggaccagttgttcgcgcatcatgatgtccttggtgacccccaactcacgcagaacaatgcgtgacgacttctgcgtactcgacagccacggcgctggaccaccattgctgagcgcttgagcgccggtctttgaagcttgttcgcgctgtgttttactggacaacggacgcggcacaggccgcaactgagcacgcggaatatcggcctcacttggcgaatgcttcagaccggaatacatagcgtcactgttggctccatcgttgggcgtccccagagcttcgtcttggttttcacgaagctggcgcatacttgcattgcgtaagaagctcgtcgctctctttggaggcaccacgggggacatgtgccgtctcggtcggttcgacgacttcagaggagctgagtttgtatgtttgggcaagacgagaaccacgttctcgttgaactcgccatcctcgcggttgtcccgatgctccgctagtttttcttcgcttgcctgccggtgggcttggatgcgctggtagttctccaggatcttctgctggcgctgatgcctcggcacttgagtcttgaagatttcttctcgcgctttctggtctccatactgcctcgccagccctcgcgccacgagattccgtcggagagcagcagacttcctgaccgccactggcagcccgctcgtttgtcgctctaaagtatctccatagtggcttagcagattgcgatcgccctcaattttcgactggccgctctcccccacagaggcagacgaccccagtagcggggccttcttcatcaaacccatttcgacctgcacactactgagtgaagtcggcaaatgactcgcaaaaatagcagaagtggggctcagcctgccctcaattagatgctcctgttcaataactgcgcaggcgcagtgatggtagcaattttgtaaatattgcattgcaatacttggtcgttctatcacttcggtagcacttccgctcaccaggtcaagtcgcacacgagagagacatggtcggaagggaatgtggaagacggtagcgcgacctcgtgcgtcacttcctcctcggtgaaaaacgggaacacgtcgcggacctgcagcgtcttggagcccaccatgatatagtccagcgtgtctacgaagcttgtgacgtaattcgtgaaggctgggatcccacacgcactcaagagctggagatcgtgctcaaagcgattcggtcggacagtattggcgtgcttgacgtcgttctcctctgtcttcaggttccaccgaaacgacggagcttgctgccagtgtcggtggctcgagtcgatctggccgtccaggagaaatgcaaccagcgctgccctggggtgagcgttccagtctccacacatcaccacggccgcgttttcaaacccaggctcggcctttcgtttcccaacgctgtcaaccacagcgacaccttggagtagtcgaatcaagtgggcgtctccgcggtagaagaggtgcgtattcgacagaatgatactcctcgatgggtccagcttggaacgcaagacgaggagttgggcgatagaaggaatccggttgatagccttctcgagttccgggaagtcctgcagcagactccgcgctgctggattcgtcgagttcttgaccgtcagcccgaggttcaatgtatcctcgtcgaccacctcaaaccgcgccgtcctcacgaatgtagcgcacccttcattggtcgttcccgtcttgcccgagtagtgcccatggtagcccagcgacgtcatcatgggctcgaagaacctttgaaacacatgttcgcccatttcctggagacagacgatgtcgctgttgttctcctcgatctcctggagaatgagctggatccggcgcgtctccttgatgacgctcgcgtcgacgtacgggaacaagttcttcttggcgtggtccgtagtcgcgtagccgtcgtacagcacattgtagctcatgacccgaaaggcctccgccgcgtccgggtacttgtccgcagcactggtcgctcccatgcgccgtcgctccttgaacacgtctcggttcgggccaggcaacacgggcgtcgtggtgacctcggccttgctgtcctctgcgaactccgatctaacggtcggcgcgtggcactccacgtagaacgtgcagcccagctcctcctgcgtcggcgtatacctcctctcggtgcccacgagcgtccccagcgtctcactggtccgctgctgccctggctggagacggaaccagcgccacgaacactcgtcggcggtgcagaactccgtctctggtaatggagtaacagggatcccagccatcacgggctccagcactttgagccccgtaacaagcggctggttgtgcagcaccacgaagctctcgcttccgatctggaggctcttggtgcgcatcagcgcgtcgcccacggtcgccactttggcgttgatctccaggccgtcggcgtccaggaacttgacggcgacggagggcgcagcgccgccagaagtcccgttcttgctgctgtgcttcttcttgtgcttcttcttggccttggagccattggaggagcggctcgaagcggacgccagcagctgcagacggtagcgcacgcgctccagtttctcggagctcaggcggaagaagctcttgcgatcgtcttgcagtcgcagctgcagcttcaggtgcgacgcgcccggcgcgaagctcacgttggcgacgcgcacctcgtccgagcaggtggccattgttgcgtcaagtggtgtagccatgttgtgacgtaagttttgtttccgccaatggagtttcttgaagaagcgattttacccaatcagggagaggagctcctggcaccgcattcacaagtcaaactgaaggaacggcgaacatggtggagtacgtggcctgcgcgttgcatgtgtatatatcacttcaggtcaatggagtggtgcaactacctcgctagtctgttagacagggatctagtgcttccggtgtcacctctaccactagaatccgtgcagtattgaggctgcagacgcttgttctccatcgctagtctgtgctgactgtcgtcttgtgttgtgccagcagggagtgcgtcgtggtgatcgatggcgccaacgtctcgtgccagaaggacggcaaggctcacatccccaagctcgcagccgcgattcagtacttccgggcgctggggcctgcgtccggccgctaccccgtcaagtgcgtggccttcgcgcccaacttctggctccccacgcccggcggagctgcccccagagagaatggggcgatggagacggacgactggacgctgctgaacgagctggtacagaaggaccacgtgatcctcacgccgtcgcaggcccacgacgacttctacgtgatcgactacgccgtcaagtacgacggattcatcgtcacgaacgacatgttccgggaccacgtggcaaacaaggtgggcttacattgctgcaatgctgtttgttgatctattgcgggctaacgtttgaaatctggtgtgttggcgtagcgatcgttccacgggaagcggctgacgagctcctgggtgcgttcgcactgcatcgacttcacgttcgtggggaaggaattcatgccgaatccgcgcgcaatggagcgcgtggtcgctttccagccgtcagcgacggactcgttgcctacagctacaccggccttgacgccgtcgagaagcagctcctcgttgtcaagttctagtctccagaagaccctgtcgggcgataagaacgacgcgggcgccgctgacgatgacatgaatgaggatggcatggttgtcgacaatgcaggcaacaagcggagcaagaacattgatctgtcggaggtgacgtactacaaggtgccgcgagagctgttgccgatgctgcacggtgaaggtggagagacgatggagaagtttcaggagtacactgggacgtacatcgtcttgccgtctcatgcggcagtagaagcgccgacagcaacgccagtctcgaatgtgctaactctctcgatctatgggtacgtgcgtcgtatgcgaacgtccatggccgtcgtcttaacctttttgctgtgaatgattcaatgtagcccagaagccagccgacagcaagctgtcggacacctggatgcattcctgctcgagatgcagcaaaaagcgcagtatgcgtttcagcagcaacaacagcagcagcagcagtatatggctgctcagggccaccagacagtgatttgccatcctcagcaacatcaatatgcaggtgccaatggaagcagtggaaacatgccaccgcaggacgatcagatgatggagatcgatccgtactagagcctagtagatgttacaagttgtacaaggcagaaacgctgcgtgagcctctaaattatttccatccgcgcttgtaagcgtcgttgtctgcctctccgaatttcttctcgtcctgtttgttcgtacacgcgaagttaacccactcatcagaaaactttacaacataatacaccactgatgccaccacgtacccgcttctcttctttccatccctgagcatccatctccttccttcgctttccgcccttctggaacgaccgccagttgcccactcgcttctcccgacgatctgtttcggcccaagagcgttcacgcttgaacatgttcacgacctcagcctgctccttctcctcctgttctgcctcgcgccgccgctgagccgcttcccgcttttcgatgttcaggcgcctgttttcgatctcggcgaacgcacgcattacggccttttccactgcatcctgcatgtcgccgagctcgctctccttcgcccccttcttgatcttctgacggcgttccttctcgacctcctccgtcgcattctcaatcgtgcgaatgatggtcttccgccggtcttcctgcgtgatgagattgtacgccttcttcacctctgcacgtccaaaacaccagaaaccattcaacacattggcatttcccccaaaaggccacgtatccacacgcaccttcaaacgcctcgcgcgctttggggttgcggcatttgtccgggtgcaccatcgtcgaaatctacacgccaagtacaagtccacaaaaagtcaaacaaccttacaacatccaataaaagacacaaaccccgctgaccttgcggtagtgctgcttcatgtcctcttccgtcgcgtccacgtccagcatcaacaccctgaatggattgagattgatccacttgaagtgcggctgcagcagccgctcaatctgtccgtcgaccgtgccaaagtccaccggcggcttctccttcttcttctcctcctgctccgcgtccttcttgatgcagttggcgctctcctccagctcctgcacctccgacatgaactcggccagcagcgcgtcctcgtccttgggctcgttcttcttcttctcgtccagctcctgctgcctcttgcgctgctcctcctccttggcggcctggcgcgcctccgcctccttcttcagccgctcctgctccttggcctgctcccgcagccgccggctgtgctcctggccggccgcgtacgcctcctccgccgcgcgcagcagcgacgcgttgtcaggctcgagcttgagcccctcgttgtacgtggcgcgcgccgcgtcgaagcgcagcagcgcgtgctcggccgcgcccttgcggctgtagcccttccaccactcaggcttgagctcgatgcacttctccgcgtccctgagcgccttgccgcgcgcgtcgcccatggccaggtacgcggccgagcggttgctgaagtacacggcgttgtccgggtccagctccagcgcgcgcgagtacatctccacggcctccgtatactgcttggcggccagcagccggttgccatccgccttgaagccctcggcctgcgccgcccactcctgctgctgctgctcctcctcctcggccatcgttgccagtatgggatttgtgtgacgtacatcaagtttgtctctcgaataggtgtctttcttagtcacttgtacgaaaccaccgaaacgatggatacctataggaaccaacggatacctatgcgaaccttgcgctttcctgtacaaagcttgaagatagatgtcgcgagccaaggtgcgcggcgctgagttggctgctgctgcaagcgcaccgagttcctaacgggtttgcgtctatgctgctgctgtgcaggaagctgtggtggtgctgctggacgtgggcgcctctatgcgcgtgccgctgcgcgagcgcgtggccgctagtgacaagaaccgacaagacccgggcgacgagctgcagcacacgcgcttcgcggcctccatcgccgccgtggagggcgtcgtccagcagaaggtgggcaagaagctgtccgtgtagttaatagggttcccgtgctaacagttgtcggcggtgtggtagctcttcttcaagcccaaggacgaggtcggcatcgtcgcctacggatcggaaggtattgtgcaaacagcactacagaaatctgtggggtgtcagctattcactgatggctttgtgttgcttgccggtgcagatacggacaaccagctgaatgaggagcaaggcgagagcgagtatcggaacgtgcaggtggtgaactccatcgactcgccgacgctgcacatgattaagaggctgcgagagctcaaaccgtccagaagtgaggacacgaaggtgcgttcaagaatttattatttttattaatcgctgaaggtgatgggttgtttgatgctgcttctggcaggtggacatcctggacgggctgatcgtggcgctggacttgctgttccgtcggacggacggcaagaagtacgacaagcggctgatggtcattaccgacgcggctgcgaagatcgcggacgcaggggacttggagtcggtcgtgacgatgattcagaacatggaagtcaagctgcaagtgatgtaagtgcggcgttatttcttctatagatcagtatggtgatcattaaacctttactcttgctacgtgttgcagtggactcgacttccagcatacgacaattaagcctcaaaaggataaagaaggagatgaagagatgccggaggccaacgtgaaggacgaacctgatgcaggtggagcacctggaccagagcgaattaaggtgcgtatcctgcgttggatatcttcgagaatttgtcagtcaggtctaaccacgattgatacaggctgagaatgaaaagatgctcgtgtctatcgcgaatgaagttggaggcgaagtgtgctcggtgtccaagcgcatgcacttacttgctcaagggatgaagaaaacggtggccctgacgacaaaatttcgtggtccgctggagtttggcgacgcactgggaattcctgtctattgctacttgaagaccaagactgcgacattgccaactctgtcaaaggaatcgcaaagctcgtatgagaaggaggcggccggaaaagtgaaactcgaccggcgctatacctccccacagaatatcgacgaagaagtccctccagaccaacaagtgaaagcgtatcgctacggcgcggagaaggttccgtttgcttcggccgacgttgaattcttcaagtttcagacggagaagtcgctcaaggtgctgggctttctggataaagcgcagatcaatcacgccaagttcgtggctggcaccgatatcttcgttgctgaaccggggaagccgcatgctgcgacgtgcttcgccgcgttaatcgacgcgatggtggagctggaccaggtgatcgtggcccgcttcgtcgcgagaaagaatgctgcgcctaagatcgtggctctcatcccccacgctccgtcctctggtcagggtgaaaactactacgcgatgtggtcccagcagctgccgtacgaagaagacgtgcgcaactacgagtttgctccgttgaagtcgcgcaagtacactccgactgacgggcagcaggccctcgcggataaactagtcgacagcttgagtatccgcgatgataaggccgacgaggtgggcgcgtgcttcaaccccgtgattcggcgcttctttcacgcggtgtcgatgcgtgcactggacgagtctgctggagttcctgccctcccatcctacatggaggctagtttgaagatggatcctgcacgtcaagagaagatttcgagtttaatcgagaatttcggcgacgctttccagctgaaggaagcggtgaagaaggcgaaggaccgcaagaagaagtcgttctggagtgatgtacctgccgcctctgtgaaagaggaggacctcaaggaggagcatgacgacgccgctggaggagataacgctggctctgacttggagctcgacctggacgagctcttggatagcggagacgtcaccagcgtgggctccatgaaccccatcgccgacttcgaagagctggtcgagtcttccaagtcgaaagcgagtcgtcgtcagcagctcaccacagccgtcactggcatggagacgcagatcgagaagttcctgagccagagcgggtcggagttctaccccaaggcgctgcagtgcttgacgcacttccgtaagcgcagtgtcgagatccagtactcgtcgcagttcaacgaattcctgaccaagctgaagactgtgctgacggaagactcggatgcgtggaaggcggtgaagagcgcggacatctcactgctcacgtcggcggatgatccgagtgtcgacgtctcagccgccgaagcgcgcgcgttcctgtacggcgaggaagaagtggacgtcaacctggctgcagcgtcgctgtcgtcgcaactcgaggccatggaggaggaagacgacatgttcgccgactttgagtaaacacccacgagagtaacgtaaaggaggaaatgtcgttgagtgactaactacagcctaaagcaaaaaacaaacttgattctaggtaagttatggcacagtcttatgccgctcccgggaactcggccgccgggtcgtagaacttggtgggcgccttccgccggcccgagcgccgaaccatagtgaagccatcctcgtccacaagcggctcgtcgggctcctgcatgccggccgccgcctcctcggagatggctcccagcgcggcgccactgccctcggccaggccgacgccatcgtcctgtgacttcagcttggccttcttgaggtcgatggggaagagcgactgcacctggtcgtgcatggccttgacgcggtcgtacttggcgttcttgcactcgtccgccagcaccgtgagcagctccgagatctcctcgacgctgccgtcctcgcagatgagcccgaactcggtctcgacgtagccgctgatgttgtccaccatggcgtccgcgtacaccgtcttgttgtacttgaacacgttgaggatctcctccagcaggatctcgtacttgcggcgcgtgtcgccgccgccccactcgccctccacggccatgcgcagcgccgtccagcgcgccagcgccagcttcacgctgtacacgaagtagtcccacggggacttgatggtgccctcggcgaactgcttcgagtgctcgtgggccaccgccagcaggatgctctccgtcgcgctcatggtgatgatgtcttagtgtcctttggcttcgatagccagaatgaactgaggccagtccttggaaatcgattttcgaccaatcagagatgcccgactaaaactgaagctgcgtctgacaagttcaaccttcacttgattgacaaccatcgccagaaggacacagtggaggacacgatgacgtaaaggggggaatctcgacaatttcttagatggattatagtacactgttgcagtgtagctctctaggagcctccgacgcacgaacatcaagtcaacgtgccagttaatcaagcagccgcgacgaagtcgacgcgggcgtgccggactgccagtcggacgcgccgctgaagccgcgcgactcgcgcgcgtggcggaactcgtcggcagccgaaagctgccgcgcctgccgcaccaacttctgctcgtcgcgcgccgcacgctctaatctggcgtccagcatgagcgtgagctccatggcttcacgtgccgtggcctcggcgtcctcgcgcgcttcaatcgcggcggtaacgaggcccttggcctcctctatttgcttctcctgctcctgtccgttcttgcgcagcacacagatgagttcgatgaggtccgaaggtgaagactgcagcagcgactccgggagcagcgggtcggccagctcctccaggctgctcttggccttctccagctgcgccgctgtcaacacaccgtccacgccctgcgtctgagtgacgcgcatctcggtcgtgcggatgaactcccggaactgctccatctcgcgcttctgtgcctcctcgcgctccttcagctgttccagacgcttgcgcgaccggcgcgggtgcagcagcttctccagggagttgccctcctccttgatggagccagaaatgttgtagctgtcccggaagctgccgacgctgctgctcgggcgcaggccatatgccgaggacctctgcgacatactggcacggctagcactgcgactgagcctcgggttctccaggtgctccgacactcgtcgctgcacttcccgctcgcactccagctccttcgcctgcttgtacatgctgatctgcttctccatggcctcaatgaccttctgggttcttgcctgcacctcctgctcgatggtctgctccatgtctgcctgtttcttcgcctgctccgccgtgagctcctcgagctgacgaaggcggaactggaacttcctgtactcgtccgcgcccagacgcacgacacccgagctgccctgagagctctcggcgctgctggttctccacgcgtcgctgtccgactcgtactcgtcacctgaatcctcgtcctccatggccaagaccatttgctggaacgcgcggcgcgtctgcagcgccgctacattggcctccgtcattctcgaggtggccgacgagttcgaggcctcagagaaccgggcggccgcagaaggagctgctggggctggtgggagcggcgcggtctccggcaccgccggaactgcaggcgtaatcgccgtggacgactcggatatccgcgcgttgagcagactgtggccttcagacgagcgcaccgacgagttcgtagtgcggaatccatctaccaaggacgtgcgcatgtcgctcatgcggtcgctcatccgcgagtcgctggagctggagctgttgcctcggtatgcgtcgctgttgacgcggttcttgtacgacatggagcattggagctggcggtactctgcgaggctgttgcggttgttgcgcgacgaggcgctgtgtcggctgttgcgcgtgctcggggcgcggctctgcgggggcgtgttcaccgagtctctggcctcggagtcctccgagagctccgagagctccgtgtcgttctcgccgcccgacaggttctcggggctggtgctgctgcggagcgtggagaccgaggaccggacggaggacgagagcgtggacggctgcgtctgcagcgacttggccttggtggcgcgcggcacgacgatggtctgctcgggctcgcgcgtggtcgtgggctgcgtctggcggcgcggcttcctgtccgagtggctggtgctgctgctgcggctgctgctaatgctcgagaccgagtcggcgtcggcgtccgagaggtggcggtggtgcttgcgcagcgagaagcggtgcgacttggacttgccgcttccggcccgagacgaggaccgggagaacagcggcatgcgtagtggtggggggagggggggggtaccacggccggcgcgtagtggggagggggcagaggggggttgagtagggggggtaagttagcgtcgccttcgctgcctgctagtgtccgacgaccgatcagcctgcgccccgagctcgtgcgcgtaatgcgagcgatggattaagccgcagtaggtagaggcaacgcagagcaaagcaaagcgcgtccttcccgccgcaaaggagaggaggccgcgcagtatggagaatgacccaagtcagcgagcggggccaaagcgactggcttctaaaataccgactggcattttgcgccaatcggggagcagctgatccgctcgttcggccaatcgcgccgcagatcgagaggtgcaacgaggcgacggccgcagttacgctccctacccgccccacagcgacgagcccgccagcgtctctcgtcaggtggcgcaagcgcggcctgcgtggcggcgaggcgaggctcgatcctttcctgcgtattttggggctgcgctgatgcttccacggcccccctgaaattccacgttgattgcgccggtggcttcgagcgccccattgatattgagcacctctcgcctccgctctgcacggccaaaaattcggtgacgcctggggaccaggtccgcttcgggcattgctaacgagtgtacatcggcagaaatcaggcagatgcggcgcggtggagccgccacaaatttgctgcccttccgccccgaagtcgcgcgcgcggggggtcgtcgggcttttcgatcgttgcagcgccagccgcgcctaagacgacggtgacagccgaacggatgtagagcgccgccaagtgctgaaaatgggcgggctcgggctcgcctgcacgacgatagcccctcaagttgacacggcgacgagggctgccccttccaattcagcagtagagctggtgcgaccgtaagacagacgaccggagtgggagcacctccgctgcttgggtccatacagttgtcgatgtgacgtgtgacgtttcggtataaaattacacaggtagatatccatacaaagaccaatttctgaagatgcagtttggcagtttggcgagtctacatctcgccggcgaacgagcgcgtgatgctcatggtggactcggcgcagctatcgcaaacgcgcgacgccttcttgctcgagctgtacgacagcgtccaccgccgacgggagcagttcccgcacacgagcgacccgcacaatctgtccagacacaacgaggcacaccaaccacacggtcgtattccgcagcaacagacgagttagcgaccgcacagcgaggtgacgacccgagaagtgtcaaatggaacaagtcatcaggagtcagtagcgtccgccgccgactcctgcgcaaggctccaaacgtaaggctccgtacatacctgcagtggtggcgcggtcgatacacggcgaagctgtgcgtgcagatggtgcacacgttggagaccttgtcgaacataaagatcggggccagcgtggccgtcttgaggctgcggcggcgcagatccagctcgtcgccccccgagatgcaatgggttaacgcgcgaacccattcctctctttccgcgagagacagcgcctcgaacacgtaggtcgtctgcgtgcgcagcttctgcacgcgttgaacaacacacaacaaggcagtgagttagcatcagtctgtctgacgagagcagcgcatgttgaagtggcagcacgctgaagttggtgacagatccttaccgtatcgtgcaggaactgcacccggaagcacttttcgttcttgagaggcgcgacctcgcacagctcgatcgggatggtctcttcaggctgcgcggtcttgaaagtcgagcccagcgaaatcgtttgcagcgtcagcgtgatccacagccgccgcggcttcttcccaacgctgctactcgttgtcggactgggactcgggccgctggccattggcacggcgccgccggacacgttcaaccagccattcttgataacgaagcccccttccaactcgtagccactggatgagtcgtcgtcattgtccatcagcagctccgagcgaacactggcacgtcgcgggtgtgtctgtccacggaggtttcgctcgatgcaatcgcgaatgtcagttgtccagcccactttgtcttgctccgactcggtcaacaggatgaacgacttgagaggcgagtagaagcagaatgcgctacagtttccagtaacagcacaacaacacgtcagtctgaagtaatggaatggttctccatacacgcatgggctcacttgttcgaattcacaacagtcgtgatcacacccggcatcgtctccgtatcttccgccaccttgcactcccagagatcaatcaagcggaacttcttgtgcagaccgccttgccgcccgtacaccatagctgaatcaaacacacaaccacaacactactaagcaaacaccgtacccacagcaccgagcatagctcacttaccgtcttccagcagcacgaagtaatacgtctgcaccttgcttcgacaaaccttgcgaagcataccgtcgcgcacgaagtgtcggccactgagatcgatcccaaccttagcactcacggtcgccaaagtgcgcacgttctcgcgtctctcgctgatctcctcgatcttgctggcaacacgatccacgctgcgaatagccgactgcaagggcacgaagtccacatgctcgggcggagtggatccaagcagttcctgaaggagcatcttgtagcgcggtatccgctccaccggcatgttgaggtagcgcctgagacggtttgcatctgcttcttcgggcagctcgcgtagaaatcctgcgaattgaggcgagtccagtgcagttagagcggagctgtggcggcttgcgtaagacgtgtaaagctgcatgagtggtgcgtaagcgtggaagatagcgccagctcggtgcactttcacgccaggaaacccagcaggtttttcatctcgttgcacgccctgctggccatcttctgtgttcgatgctggagttgatgtggcgctggtttcctcgaggtgtcgagacaaatggtccaagagttgctggttgagcgtgtagatctggtccacactgctgaaaaagatcgacaggtctgcgtccatgaccaacatcttggttgtgggggttgcagtcgtcgacaacgtcggcgctgagctcgcagcagcagccacgctgtacgacgcactcaccatcatactgtgcaggctactgctgctgccaccacctttcgtgataccaatgttaccgctacttccagcccgacggtggccacgagccgagcgagcagatgcagctccgagtacaggtacagatcgcaacgacgatctgcgcttgttttggcggcggcgatacatctgccgtccttcgagctgcctcaacagcagcggttgcacgaacagccggatgcattcccccaagcatttaacatagctctcctcggagcgaatgatctccttcaaaatctggcggcgacgacgttccagcaaatacgcttcacggtcttctcctgccgcttgagcaagctccatcgacagctctgcatccgtgacgcgcccacggtccagcgacgacatgcggcgtcttccaggagcgccaccaatgaaactggagttggatagcaccgacatcgaggcccgcaaactgcttgaaggcatgctcatactcaagctcaagatgccgctctgagcgagtgaaccgggaaaatcggtcactcgcgagcgtcgcatgcggttcaatgccttatccgccgagctctgaatcgcaacacgccatgccacctcttcttgaacggttgaagcgcacaagacccactcactttcgtgcaatgtagccatccctgacgctgacgatgaaagaagcgacgatgatggcgacgaagctggcgcagggtggaccggtaacggggaagactggggaactgtactgtcacgagattgaagaaggccttcaggcgggatcgcaggctcacgccgacgtgatacagcgtcattaaatcgactgacagcttgcttgaggggcgaaagtttcttcatgaggtgcggtcggatcgtaggctggctcaaacgtctgccgatgggacttgtcttgtgctgatttgttccattggctgcagcgctggtcttggcatcggtctcatcatactcggaggttgaaatttgaaagcaaaagcgatttttgtgggcgcggctgtcggatcggtggatcacaatggcaccagcgagagcaagttcatcggtgcagcatctcaacgcgctgttgttagcaccagcgctggcactcgttggcgctccaacagcaaccaagcccccacttccggagctagcaaaacccgcaccgttgccattctgagccactggcgtaacactcgtggctgctgtttccagtgcgtactgcttgagtactccagcgcgaagttcgtagtagtgttccgtccacttgttcaagcgacggcggcgcaacactccccgaaattccactactctcgataaccaatgcatcgcaatttgacgcacgagatcaatgatcttgaaacaatgagtacacaccctctccgcacgcgacgattctccaacaaataacggggcgcgtccagaagagcaggtgccacacaccaccgttccacagcggcggcaatggtgttttctccggtagtacgcgcggaaggaggccttgcaaatagtacaaacgtcggcgatctcatcaggaacccaaagcgcagcagcatcagctggtccctcacacgcctcggggtttcccccatcagcgtcaccagagtctcctcgcttcgcttgtttcagcttctgagcatctttcacagcgctcgcaatggcgtctacccactcccgctgaatgcctggagtctctgcaaacagaataaacgttttctctcggctggtaaccacaaagccacagtccttgtgaatccgtcgacgcgactgctgctcgaacagtgcctgtactgctgcgggtagttccgtcttgacgcccactgctttggagtgcaggtacacgatccgcctcacgcggtatccgccggtaatcaacacgccgctgtagagcagaatgtcgttgaataggtgaatcatgacttcctcctgtcgcttggtcgacatcttggtgagttttcccgacttcaacagccgccgatctgcagtgaatagcgagagctgtcctgcaaacttctgctgggcttgtaacaccgtctcgagattttcctgtcgacgcacggtctcgttaataagtgacgccgtggcgcgtatacgattcaccgcttcaatcaggaacgctgcgtccgggtgatcgggcggcgtcagttcgctcagacgctcaaggagcagcttgtagcgtggaattcgctggatgggcatgatcaggaggctctcaaacggcttggacgagccgctgcgttccctgcagttctccagaaactttctgaaccccagtctcgtgtcgcggccgaaattctgcagcagcgccgccacttcctcgtaatccttggcgtaacctccgtacagcttgaacagcggcgcgtacctgcagaagacggcaccgacgccttcggcttcgcattgcacgacgacagccaccgggctcttgacgctcttccgcttgcctgtgggtgcagacgctcctttcgctttcttcttctgagctgctgcttctgctgctgccgccgccgcggcgcgccgtgtcacgatctccagcaggtccgtgagtagcttcgagttgaacagcacgaggtgccgcaggttgttgaagaagacggcgatctgagcgtcctgcatgatggggtgcgcgttgtcctcgagcaccacgatgtagtggtccagcagcgtgcggatgtcgctcacgtagctcttctccgtctcgcagatctcctcgacgacgcgcgcgcgcagccgcactcgcttggcggtgggcgagtccgggtctgccgcatccacatcattgttctcctggttgtcctcctctggagtgccgtcatcttctgcatcattgtcttcctcctcttcttcttctgcaccattgtctttatcgtcatcgccgtcgtcctcctggttgtcctccagcagctccaccgtcagcgacgactgccgccagtcgccgccgctgccttccaggtccttcgggtcgaagagcacgacgcctgggcgcagcgtcagcttcttggacgccggtcgattgccgccgtccgcgcggcgtctgcggcgcgtggtctcggcaacaggagcaggagccaccgccgccgctggctgctgctgctgctggtcgtggttgttcatgggcactcgaaacttgcgaatgaggcgcctttccgcgcagctcttcctcgaacttctagctctgctggaggctcgcaatagccgtcgctggacaccactgcgacgccacggcgctccagcgaaagcgaaagctcggacgtttccacggaaaaatggccagaacggttgccggaagtgctatgttgccggaagagctatgttgcgctaaggcagaagcggtaggacgggatatgaggtctcacaagtgttagagccttgttttactgataaatgtacaaaacgatagtatcggtgtaaaaagggtatgtgttcacaatcattgatgcggcgaagttgaagtcagtaagtagacgaagcaaggcgacatctgcactgctcgaggatttcaatggcgtcgggagggacgacacgtttggctcggcggccgcagtggtacggaccggacaacttcagttagcgctgactggtagggctgcaacaacgcggaggaaggtctcaaccctaaagatcgctgcgacagcggtggagcgaatggcgggccccatcggcgcggccatgccgagagctgcggtggtcgtcgtcgtgtggattcgatattagcgggggcgctgaccaccgtagcaggagaagcacggctgtgtgtgctcacgtcggagcagtatccaggggcgcgagagaacttttgcgcgctccggccggtgctggcaatgcgagacgaaatttgggggcgcgcattgcgagcggccagacagcgggacgtccattaacaagcccagcggcatggctgttgcccccatttcagtggatcacccgcgaactagaaatgcggatgttgattgcaggcccccgcgcgagtcaaggccaacgttgcgctggaaaccgggggcctggatcgtctgagtggtgccagtcctggagcagcacgaacacggtcatggtcaagcggggcttttcacccgagtggcgcagccccaaaggagctgaagtgtgggcagtacagtagcggaaacaccgcaccatcgcaggcacacaaactcgcatttcatttcatcgtgctcatgctgtccctacggggcagcactttcttgtgctgctgctccatctattcgaccttggtggtcttcttggcgggagcctcggcgagacgcttgagcgtcaggtggcccgaccagaggttcacggagcccagcacgctgagatagcccagggtgcggaacatggtcagctccagccagtagaggccgaacagggccaagatgccaccgagagacgccaggaacacggagccaaaaacgaacacagagccctcgaacagacgcttcacgttgagccccagacgcgccacaaacagcaagaagaaggccagcggggccagcacggcgcccgtgaaggccagcgacacggccacgggcggccgtgggtcctgctcgcgcatcacgtgctggatctcgggcagcgcctggagcgtcgtgtcactctcgtacagcaggtgcttcttgtagagcggggacggcgtctcaggcggggccgcgccaagctgcagctccacgttgccgaggtcccacacgatcgccttctcgaaggtggacgctcccaggatgagctccacgtggtgcttgcccgagttatagccgaacttcttgctgagcgcggcgaactgcagcgtcgtgctgtgcttgaggcctgcgtcggctgtgagcacgaagtacgtctccgtcttctcggtggcgtgcgtgaagcgcaggaacgcctggtgcgccacgacgggcgttttgtcgtgcgtctgctgcagcgtcacctccatcttgagctcgtcctcggcggccgcgttgaagtcctggcccgagagcttgtcgccctgcttcagcgtcttgccgttcaccttggcgctcgccacctgcacaggcgtggtcaccttgagctgcagcacctcataggcgctctccttgctctcctcgtcgaccgccgacaccttgagcttgtacatgccggcctgcagcttgttgtcgcccgccagcttggtcacgaacttgctgccgtcgcccttgagggtctgcacgtgacacagtcacagcgtcctgtcagtttatccccttcaacaagacccccccccctctcttccggcatacaacgcaccaggccggagagcacggcggcgcccgtcgtgtccacgagcgtctcgagcgtcagctgcttgagcttgggctgcttaggcgtcaccacgacggccacctccagcgcgtccgcggtcagcgccacgcgcgacgaggccagcttcatgttcacattgagcgcggcgtccaccgacgccgacagcagcagcaacgcggcgccgcacgcggccagcagccgacacgagagcgccatcgtcagtctctttccaattgaccgcgtggcggcatgagctgccctgcacgtcaagatcgggcaaccgcaacggaatgactgcatcattgtgtggtaccagtgtaaccttgcagtagagcaatcatttcagtaccataaaaaacctcgaaggttttttacactcgacttgccgaatcattagaagatggctacatcagcttcaacttcgtttcacccggtggcgcttatctacttacttgtacgctacgaactcgtcgatccactggtggatcatcttaacctcggtcttgcgagcggcaatgaccgacggggggtccttcgggtggctgaagaacaggtccaggtggtgggcgccctccgcgatctcgacgatcgtcaccttggcgtccttgggggcgtgcagcacgccggcgctgctccacgggtccaacagaccgttgctgaacacgatgttcgaggccgaacgcagcatctcatcgccgtagctcacgcgaatgccgtcctgatcgggtgtcgtgtgccagtcgcgctggcagtgcgcgcggatctcctcgaacgtggtgttgcgcggccagaacatatccgtctcgccatttgtgctgaagtacgtctcctgtggcagcatttcagtgcagtactggtagtcccagattccgtcgtagtcccatagagtggggatcttgaagcaagccaggtccttggtggcgttgtggaacacgttggccgcgttgcggagagcctccagcagcgttgtatccacgccatcttttcggagagacggcgtggggaattcacctgccaaatgtgagcacgcctggcgcacgggccacgctgggaggtcgactgctccgccagtaagatagctggacggatacggaaaatcccccatcgccaacgtgtcaaatgcgaacagcaccgacatcgccaagtcttctccctgctcttcgcttgccaatggcgtgcacaacctaaagagcgaagaaagtgtagcgcgtccatcctccgtcttggccagctcgaaaatttgcgcccaggacttctttgcgttaggcacacagttggccgcggagcctgctgcaggacttgcatcgcgtgtgaccacctgccagtacttttggccgtcaaaagccggaaagcctccaaagccgtaaatgggcgccgaggcggcaatagcacccgcgatgatgttcgggtacttcatgcggaaccaagctgacagcatccctccgtagctgccaccgaacgcgatgacggggtggttgaacgcgtcgtacttcttctggagatgataaataagttccgtgtagtcggcaagcgcttgatcatgcgtgacataagccaaatggtccatatacttgtcgccgaacgggaagctcttgccgtagtagcggtgctctgcaaacaccaccagcgccttgaaagcctttgcgttttcccagatcagtcctgtgtggttagcgtacagcgtcacgtcgccttcgttgcccgtgtagaagaagacgggcgcctttttgtccttcgggtcccagaactgagtgttcaacaggtatcgctgcttgtacgtggctggcaggccgctaggagccgcaccggcgttcgacgggtccaacgcttcagcggccagccacgagaagtggtcgatgcgctgctcaaaccacagctccgagcagttgctggcgtctgcgcggacttgaggtacatcaggcttcacgacggggctcgtcgtgcccagagagctgcgcgggatgtccgcagtggccacgaggtgctgtgtgtggacgagcaccagcacgccgatcagtagcgccagtccgccgaacgccacgacgctggccggagcgtagctgagtactgcatagagggcggtagacagacccaatttgagttagcgtcaggtacaagatggcgcgcatttcgctagtgcggcacgcacgggtgttgtagacgccctcgtagtactgcggggcgttgaggctctgccagcggttgatgcgcacgcgcctggagctggtcgccgagcccgcggaggagccggcggagcgcgcgagcagcgggcgcccctctgcggcggcacttccatcgcgcttgaacatcctgtcctcctggtctgcttgtgacactcatccagccccgtgactggccccgcgatctaaagcttcgaatttctgagttgcgtctcgtctatgcaatccgtacgtattagaatgagagcggaaacaccaataactgataccccgttgaagtaaataacgaggatcgtcatgatttgtaagaaacgaatttcataaacgaatcactatgagatgtttcatatttggaacagatttggtacgtatttggtgtgccgcccaccaaatgaggcgcttgttgcaaggacacacgcgccgatcgcgatcaaaacacaggttgcagtctgcggcggccggctcgttgctgcgcgccaactcattccgctttcctccccgccgcctgagtgacgagacccgcggccagccgccatgcactacaagacgcacatgccggcgcggttctccgtggacgaccagatggccgaggtgcgcccgtaggctcgaactccccgtgtgttctgtccctggaggttgacctccatcttttgcccttgctctctctctctctctctcgttgcaggcgctggcgtcgcaggagctcatggggaaccgccagcggaagaacttcctcaagctcttccgcaagtactccaagaccaagaagacctccatcgactggtaaaatctgcctctgagcgtcttgcgtcttgcgagcgggaagatactgactgtgttgctgttgttcttgctgctaggaactcggtgaagccgccaacgagcggcatgctcacgagcaacacgtcggtggagagctgccccaacgacatgaacctgcgccacgagctgctcgacaagctggtaagttgcataagggagtgcagtagtagtgattacgtggcgctgaagcgatggagatgacgaggagtaatctgatatctttcttggtttggtgcttttgggtaatgtacaggtcattctcaagctcaatggtggcttgggcacgacgctgggctgcgagggcccgaagagcgccattgaagtgcgccaggacctgtcgttcctcgacctcactgtgcgccaagtggaggtgcgtacttttgatatgcggagaggtttgagtcgtttagctgatacgtctgtatattgcgccaatagtacctcaacagcgtctacggcgtggacgtgccgcttgttctcatgaactcgttcaacacgcacgaggagactgtgcgcatcattcgcaagtaccgcatgcacaacctgagcatccacacgttcaaccagagttgttacccgtttatcgtcaaggagacgatgctgccgctgccgaacactaagtacgaccgctcgacgcgcgagaaatggttcccgcccggtcacggtgacgtctacaacgcgctgttcgagtcgggtttgctggagaacctcatcaaccagggcaaggagtacatcttcatttcgaatgtggacaacctcggtgctacggtgaacttggacatgctgtaccacatgatcaacgaagactcggagttcgtgatggaggtgactgagaagacgcgcgctgatgtccagggtggcacgctggtgagctacaaggacaagccgcaccttttggaagcgagccaggtgccgccggagcacatggacgacttccgcgccatcaacaagttcgagacgttcaacacgaacaacctctgggtcaacttacgcgcaatccagaggctggtggcgcaggacttgatcgacattgaaccgctcgttacgttccgcaccgtgaagaaccacaaggtcgtgcagctggaaaccgcagcgggtgaagcgatccacctattcaagaactttatcggactgaaggtgccgcgctcgcgcttcctgccggtgaagtcgtcgtcggacctcttcctcgtgcagtcgaacctgtaccagatcaagcacggcagtctgatcatgaacccggcgcgcaccacgcctacgattcccatcgtaaagcttggactagagtttcagagcgccaaggagtatctagcgcgtttcgagcacggcatcccgaacatcacggagcttgaccacctcacggtcgctggcgacgtcaagttcggctccaacatcatactgaaggtgagcataatcggtcttgtcgtggagggcattaggaaacttacggttttgtgtggtgcttgctgaaacaggggacggtgattcttgttgcgaacgaaggcgctcatatcgaccttcccgacggaacagtgttagaaaacaaggtggtcacgggcaatctacgcatcctggaccactaaataccggaacccgtacgcagtaaagccgataggagacttagcctgcgtacttgtacgtgaagggctggaagaaaagaagactgaaagccgcaactgaaaacatgcatatgcattattgtcttccacgctaacatttttcttttatacagaaggagctatacatgcagttgcagggacccaagagattgagaaggataatgcgccgacaagcgaggagggcttaggagcctaatagaccgcaacgacgtgtttgcagatcgggcattggcggtggtacatgagccactggtcgatgcattcccggtggtagaagtgcaggcacgggagcgcgcgcacctcttcctccgcttcgaactcgtcacagcacaccgcacacaccgtattattaacctcgctgtcctcttccgtttgattttcatcgtcgtggcgctcacggaactggtacttgaacgtcggcagagcaatgatctgcgggtacggcaggccatcccagctctcggtctacaccacacaatgtcagccacagcgttagtagcaagtcacaaagtctaggagagcagtatggggaccacgtacatcaacttgctgagatcgtagctcgttaatacgacgaagtaacgacaggaagcgcagcttgctctgtccctcggccgcgttgtcctcgctctcatctgcaggtgcggacgaattggatccgagcatcttcaagtgacgacggatcagtgagaagagcttattctcatcctccaccgcttcaacatccgcagaggagggtccctcagaagtaggtgcgcctgccgagggtagtgaacctaggagctggctaagcgctgcattcaccacactgcaacattgaaaaacacacacacacacacaagaatcaacacacgtgacgacacctcccatgagtaacaacaagttcgtcactggcacgtactgcgaggggctgcgtgggcccacttctgaaaagtcggcgtccgtcgacgcttgacgcagcgagcggatgaacgccaagtcgagttctccgttgaccggcggcacattctgcgagttgttggtcgccgcctcgtcgatgtcggcggcagcgattgagatgaggccggcgggcgacagctgcgcgttgagcggcgaggaacccatgtcctccactcgcagaccctccacgtcctccagcgccatgccgtcaggccccagcagcgccgctagtcgagacgacagcgtcgggatcgagagccggcggctggagtgctcgtctccagtcagcgccgcggccaggacgctgttcttcttcttctggccttcgtcctcgggcgcagcgtcggcggcgtcagcctcttccatggcgcgcgcgatctcccgtgagctggcggtgtcttcctcccagtagttggaggcctgcgggtccacgcgaggctgcagtgcagcaccacagaaagaaatggcattaagtttagtactgatgcgtcagtttaaggcaatttgggcgctttgagcgcgtacgtggagcgcctgaggcatgcgcgagccgtagagtgaccggaggaacatggcgggcggtgggcggcggggctgagaaggactggatctggcggatccgcgagcagacgcgcgtgcttcttcacgaatgtgatggccctggcacagagtcaccaatagtgaagccaagtcaaagttcgtttgagcgtcgaaacctacgattaagcatagttatattcttcagcacaggtaggactaatggagtgtagccatctgacgattaccgcgccaattccatcgggtcgagctggtacgaagcaggcgccaagtagtccgaggcgccgccgccctccgccgcctccagcgcagccgcctcttgtctccgcttggtgtccaggcggctgtagctcttgacgagcccgtggaaggccttcagccactgcggcgggctcagaagctcggttcgcccgccatccttgctgccgctcggcgagaacgagaagagcaggtccaagtacttgtgcaggtactggctcagccgctggaagcccatgtcgtcatcttccagtggctggagcagcgactcgtccctcaggatgtcgtccgcagtgatatccgcgtccagcgcatccaggaggttctcgagctgaaactccgcgcgcccgtcagcagttgctgtgcgtctagacaccaccaccacgctgtgagccgggtccatgttgaacacacgccgctccttgctgagattcgtggcgcttagtgcatcacgcatgcgcaccgatccaacggtgctgccccttagcgaccgaaataaggttgtcatgcgcgcctccagcgccttgcagtatgtcaccgtagccgatcgtgatggtcccgaaccctgcgtcttaagtgaggcgtgcaatatctcgtcgagggccggtacggcgtataataccagcggaacgcagcgacctggagcaaaagcattcccacccgcatttgacgacgacgctgccttggagtggccgctccaaggctcacgcttggaatgcttggtcgacgtcggaacgaagctcaacagctgcgccttctccattgccagcgcccgaacatctttcaggatatcggtcgttactcgggagtcttctcttagtaccacgaccaagtggcaactggagtagagcagcacttgcatcgtgagcttctcgcgttcaaatgcgtccaactcgttgcgtatccgctgcgtctcactcagcggtgtctgctcttccacttcttccgtatcaatagttgtcggttgtcgcctacccggcgacttgttcttgttattgctgttaggagtcgccgctttggtcgctgcaggcggacagaagcacaaactctcgggtcgtgccacgcccagcaggtagatgcatctagcgacgtcgtcgtagtacaaatggatactagcaggcagccgctcgtccttcacagtggtcgcagcttgcatctcgtcgtctctgaagacgcagcggccgatgaggcgattggcgaaggcgaaggcgcgcgaggaggacgaggagctcgtgctcagcagccccacaaccgccacgttcttgttctgcagcgactgcagtgctgcgagggtcccaccgcggacaggttcgggaggatacatgcgcacgggctcattctgactgcggtcgaaagggagcggaggcgcgtggcgagaggaagacgccggctgccgcccaccaccgcggccgcctgccatgatgatacctgtagactgtagctgtagctgcagcgtaaatggtccgactcaaattttggtagtcaccaaatatggaccgcagagaaccactttaaacagatctcaattgcgaccatgaagcgatggacgcctcgcgagagctcgtagacggcgtctgcgcggccccgcagcgcccagcgcaagcccgagtgggacgcgtacctaacggacgactcgcgctacaggctggcccagcagcgggagctccagcgctcgctgcagcagctgagcgcggcgcacggcgcgtagcatggcgaccgccagcgctcatagctcagcgtggagtggggcgcgtagaagaggcccacgcgactggcgggtgcgcatgacacgggggagcacgagacctcgaggcgtttgcagttcgctggtgtgtccatggtcctggaggagccgacgccgcgacgtagaactccagtagtcaaatcagtgtccttccagatggaggacgaggacaggatggacccacagtacaagacccacttgcggggcgagctggaggtgctggagcagatgctgtgggagcttgagaccgagacgggtagacccagcaggcagcggaccccgcagaagacggagatgaagccgagaagcaagtcgcgagtgaggagaacgagatcggtgacgaagttgaagaggagaccgcagactcggaaaggagagaaggagggaagacaggataaaagctacgggggatctactcggggaggggcagacgacgagcgggatctcgaagaaccagaggcagaaggaggaaacgaggaggaggcggggttggaagcaaaagaacgactcggagacgtatgctatagatctctggagattggtctggagttggctcgcaacatggatacggtgcgagtgcggacgattttggggaaggctgagttttgaggctgacgtgtgtgtggcgatgggggtgttgttcattgcagctgaagaaggagcttgacaacgaacggaggctacgtgaggatcgagatctgaaagtggagatgctacaacaagaagtacgatcggctcaagccaagtgcaagtaccttgggtcaagtatcagacagtggcgccccaggtcaatagaatggtgcgtgacaaacttgggagaatacccagacgatttagaatgagtctacggatattggttctaactttttattcgtagcgggaagccatcatcgccacggaagaagccatacaccggatgaccctagcattcgagcattcacagcgaagacgaagcaaagcctcgaatccaacggcgccgagcaaatcaggtattagacctctgcagaccccaagcactgcctcaagattactgggctgaaggacatttcgtgtcttgtgtttcgggcttgccgcgataggatagagaaatggaaatctgcgcgcagaacggattttggtgagtgctggagccctggtttgcgcgcccagtggaaagcttgccgactctggcacgtatatcccgttggatcagtgcatccagtgctttcgtactggtgtggaccttgaaggtaatgtgctgaagttcggttgagaaaccaaaacaaaacaacccaaacacgttcgcacgacccggagcaacgtgcagagtgcaggagatgccgcgatggagcgccacgaagaatcacgtgttcaatatggatatattgtcattgaaccacttcaagttccacgagctgctcgaggctaaatgcgatgtcgaaggccaacggatcgttttcttcaacttgttcaccaacgttgctgcttttcacgagcacgacgcttagctaagtcctgacgcaatcgctcctggaatggagctgatggagtgatgtgcttcttagacttggaggatgcattccgtcgctcaaattcccgctctctggcagcggcggcttctgctctcgctgcgagctgctcccggcgcagtcgacgctcgtccaggtctcgccgcagtcgttcatcaaagtcaccaatctccagctacaattacaaaggcaaatacttgtccgtcagtgtggagtttcgaagtttcccaacagtacaggtggcgtacctgctgagcgcgacgtgtaatggacggcgagaaggagcattcgcgctggatctcctcccaaatgaccgcccgagacatctcgcggtactccaagtccagctgtagacgccctaggaactcgtcgcgcacgtcctcccacgtcttcttcgcgtcttcctcatcgtcctcgggtctgcacgataaagcttcttggcgttcgctttcttcctgcctttctcgctgtctctccttgcagctttgctggaactcctccatgcgcgtgaggaactctttcgcgacgtcactctgacaacacaacagacgtgttagtaccaacgaggcaatcaataccgacgaataccaacttacccaagcgattcggctcttgtacgtgacaccgcagttcggacacttcttgcgcttttgggtgagctccgagtaagactgcgggttaccacagctgggacactccttcttgtccacacgcgccagatacgccgcttcctcgcgtgttcgccggagctgctcgcgacgagctcgttctgctgcctccatacgccgcacaaagtcttcgtttcggcgtagggctgcacctctactgccccccgggccttcatcgtcgtccgagtcgttgttcgacagcttcttcttgctcgagctattgtgaagtcttggagtgaaccggcaatggcggttgtcatccaaacgcgcgaactcgtgccgcggcttctgcttctgacgagcttgagtaaacttgtccttggcaagttcgttcagagcctctctgttagccacgcgctttttgggcttcgaattgttcgcgctgtctgcttgagcaagggaagcaagaaagatacgtcgctgggtgatcgatagctgctggaactggaacgcactcagcttgtcctgcattgcgcgttgcaactcgagcttgctcaacgattgactggatgttggccccttcttcaagggcttcgagcgaactcgactgggtgagcggtgacccaccgatttcgccttagcaacactagcagccagcgcctccgctgccgcacgaacactcgcagcatcgtcttcaaagtcttcgtcttcatattgttgctgctgctccccgacggcagccttcaatccggacactacctcttcattgcggtgggcgacccgttcagctctgacttccgagctcacggtatcgagggcgcgctgcaccttgtcgaattgagcctgactcgtttcgcgatcgacttcctcttgattcatttctgctgctattgcagcaagcgttggcttgggctggtcactctgctgccgaggcacttcaacctcgagacttttggcaacctccatcagcgacggtgaggcagacgcaacttcttgcttggcgacctccagcagcgtcggggctttctgtggtggcgtttgttcatcgccactgtcgccgaacatgtcttcatcatctgcgtcgtcgacctcatccgcttcttgaggcggggttggcttcttctcgtcctgaaccgtggctgtatcattatcctgcttttcggctccaaggccctgcacgaatgccatcaaggccgacgccatcgtgattcacactgcaaaatagaaactggacaaactcgacacagggattccatcgacacaatggtgcatggtattggaatatgcaccccgaaaacgccccaaatcccaaagtttttcccaaatgatttaagaccatgggaacgttttggtacatatttaggacagaataaccttcagtatgaaagagcagcacagggcggacactcgcgcgttggctctcgtctgcggacttagcgacgggtctgcggggggcccgcccctctctcgcttcgctcgggggggcgccgctgcgcggcctgccccacccccttgtcccttacgctaagttcctcgtctcggccaggcgcggtgtctaggaaagaaaatatcgggttgcagcgctcgcgttcgctcgctcgcacagacacgcccccgcctaatcggcgggtgttggcgattagtgaatgcatcgagtgaggctcgcgctcgcgtccactcgccctcgcccatagactatagaccataatcagtcaactccgttttggtacatatttgggatagttttacgagaaagcagtcatatacttggccccaaatatgtacctaaatgttgcagacaattcattatttgggacatttggggcgatttgggcacatatttgggatgcattatcagcttcccatgatccttttcgaggagaatggcggtctcacaatcccattcctttgaatagcgcgcgttccagagcgcaagaacgcaagtctgtctgagcgtattttcatcgcgaattgcgccaagcgagattgtgcatctcgtctttggtcatgtgcaagcatattcccaatgcccaggtttgttttcctctctacgtgttggacacttcaccttgcacagacctcacacgttgaaacgcaggtatccttccgagcaccatgctgcagccgatggttcgattgcagtgagtgtcacttcgagctaagcgaccatcgacagcaagcagcagctgaaatggccttcgtgtgtaagcaatgccgcaaccccttccgaaaagacttgacagctttcgatgaggaagacgaaagctgcccacactgcgggaacatgctagtgcaacccgttggcgaattgaccgattcaagagcagcgacacccgcggcgtcgagtacgtcgtagtgccagacagtgcacgaagcactgcaaaatataatacgatcttccgctgtcaacagtgttgctgtgcttcgtgtggaatttggcaactccacaccacggtatctgtcgcagtccggcagggacgacaagaggctggcgtacgtgtcgaagcgagtgcattgcgcgctgcgatccagtcatgagtcatgaacaccgctgacgacggccagaccactgcctctgattacttttttgtcgagcagcgctgtccgtgagcctccgccttgttcagctcgcagctgatcaaccgtgaaacgtgaaccccaccgctagcgaaattccgttgcttttggaaactgaaaggtttgtcacggtgtctccactagcccagctcaagactatgacaggaaatctcggcaatagaaaccatagatcacctagagatacactgacgctatcgcaggacttgtaggcataaagcaatgctgtgcgcattccagagcgaacagtgtcgatcaccagtcccgcttcactccattgagatgcgcttgccggcaataaatccaggacggcagcagcctggcctcggtacgaacgcgttcgccagcgctgcgacgcgggcatcgttggtcgaaatggccgttgctctatcgctccgcgtgtgtcaatccgatagcagtccacgtcaggacttgcatcgcgtagagtaccttcaacacgactgaaccgatcatggcggcgcggcgtgccaagatggcgacttcaacaactgaagttcagtcttgtgagcagcgcgactaccggtagagtgtggatatcttcatcgctggcactgccaagtaacttggcaagtttgcagtacggcaacgccaacagcaaacagcaacaccacctgcgccgggcttgaacatggcaattgttcagcactcctcccgtgacgaaagagccgagactgggctctgcgaagggaggccgccatcgtctaacgtcccagcacgccatcggcatggtcgctcgcgggatgcgggtcgagcgctggcgctgcgagaccctcggttgtcactcgcctcgagcaagcaaccttgattcccgcgcgactcatagtcccacagtgagtcgagcgagccctgaattgcgcgggaggggcctgtgctgggcagcgcagtgaagcttccccgccagtctatgatcaattgaccgaccccggggccctgtctgttgccacccgctgtcaagagcccacccaacccacgtgcagccagctgccgcgcttcaatcgaggcccatttaggattttgcggcgttcgacgcagcagatcccgcccgagagcgtgcgcgcgtggtgtgtgtcgtcacggtcggtgtggtcagtcgcgatgctggacgccatctcgctgtcggaggaggagctggggctgctgttcgcgcctgcttcgcacgggcccagcgcccccacgcttgagactccgcagctcctccgcactaaccgcacttcaggaggcagaaaaaccgcgagccaagcgcgcggcgcttcctcaattaaacacgcgaccagcaagccgcggaaatccaagaaggcgtcgagcgcaatgaccgactccagctccttcttctcctccaggttcaccggtggcgccgtcgttcccgctcgctgcggctaccgcacgggcaagtgccagaacctgcaggccatcaagcgcaacgggaagctgcacaagctctgcgagttccaccgcgagcgagccaacctgaaccagaagaagctggaccgcaagaagcgcatgcagcgctccaagctctcggccgcagcgtcgtcctgcgagtccgtcacatccgacgacgacgcgcgcagcgtcgacatggacaacagttcgccgcgcgccgtcgaggcggcggtgaccagcagcgtgttcgtcaagcgcgagctcatcaccacagagatcaagacagagcctgacacggcgctagttctcgacacggatctcgtgctgccgaccagcctcgacgaggccccgctggtgctcggctgcgaggagatcgccatcttctgcagcctcatgagcttcgacatcaaccatcgatcttctgccgcctcaacatcgagcgcgtgtcattattacacgaacgccgcgtgagacggcctcggttttaagttattgaatcgtaaaccagtcgaggatgaagctaccgtataggctaaatacacattgtactacatgaacgagcgagcaccattcagcgaggaaggaggccggcgtatctttcagtgtgttttacttcacttgcattgacgattcctattaaacctagttttacgctaaacctaggttttacactaattcttgatacggatcgtgctgctaatcttggcccgttcctgccattctggaacctgcggagatagctgacgatggcggctctactgtcgtgggtgaacctggcgctgtatgcgctgcagctcctcgtgaacgggcactcgtcgcgcagcatcgggcccatgtcgcggcgctacgagacgctcatcacgcccgcgccctacgccttcagcatctggggcttcatctacacgttcctggccgcgacggtcgtggtcgactgcttctggcccgcggcctccttctactcgagcgccccgaacgccaccgtgctgcgcgcgctgttcgccgtcgcgtgcctgatgaacatggcctggatcgtcttcttcaccaacgagtacgtcaacgtggccaccgtcacgctcgtggtcctgtggctcgcgctcttcgcgctctacgcgcacgtcgtgcaggagcgccgcgacgccggcttcgagctcaagcgctacgtgctgagtgagctgggcgtgaccgtctacttcgcgtggacctgcgccgccacgctcatcagcttcgccgtcacggtgcagtacgtggccaacgattacctgtcgctcacggcctacgtgtcgctgctgtcgctgctggcggtggccacgctgtccgccgtcatctacgagggcgacgtcgcgttcggactcgtggccatctgggcgctcgtggggcttgcggccaagaccacgacgctggagccgcgcgtcgagctcatcgccgtgaacatccgcgcctgcgccatgcagagcgccgccatcgtcgccgccttcatcgtcatcgccatcgcgcacaagctgctggcgcccaagacgtacgtgccgttggtgcttagggagacgtgaaggaggagggggctctaactcgaaatcctttttctgtgttgtgctgcaggcaattccaaccgctgcagtcgggcgcgccgctgttcactgacaagactgcgcagcacgtcgactacgggaccacccacgcctaagaaccctctctccatgcccgcccgcggcgacacatgctgaaataaggctagatgatgaatatcaattcctcacattgatgttcttgagggtgcctgtccatcactgttagcgtttcgccccaaaacttcaagcagccagaggcttcagtatcgaaaaagccaagagatggcgacactgcgcgcggttctgcaggagacggcgaggctgccgtgggtcaacgccgccttcttcggcctgcagatgctgctgacgtgcatcgccctggcggtgggcgacgccgccgacgtgcgcgcgcagcacgacacgccgctgacgcccgcggcctacgccttctccatctggaatgccatctacttgctgtgcatgatcctgctgatcaccgacgtctcgtacgccggcctgtcgctctacgactcggccgccaagcccaacgcgttgcggctgtgcttcgccgcctcctgtgtggccaacggcacgtggtgcattgtgctggccagcggagacgtgcttggcgccagtgtgctcgtgtcgctgctgtggctcacgctgctgccgctctacgtcttcgcgagctacgagcgcaacgtccagacggtgcagtggcacgagtatctgtgcagtgagctgtgcgtgcggctgtacttcggatggatcacagtggaggcggtgctgagctggaccatgacgctgcagatcgacgccggcgggttcctgccgctgtcgacgtacctgatattgctggccgcgatgctagtcgtggcgctttcggggctctctcatggtcgtgacccggtcatggctctcgtggtggcgtgggcgctcgtgggcgtcacatccaaggacgtctcgagcttcgacccaattgcgtttgccgagctcgagaaagtgcaggccgcaagtacactcggagctggcgtgttggtggccatggcgctcgtgtcctgcagctacagggccttgcaactcaactggtacgttcgcttctctgctctcatccgtcctgcaagcccaattaaccgatcgctactgtggtaacaactcgttctctcgtgacacacacttccagcgcgtccaagccgctgtcgccccgccctcgccgactgtcgagactctcgcaagcctccaccaaggacaacgagtacggggccatctcactcgcctaagccaccaccgtcgccaccacggtggcgctcaaatgtatccatcttgccttgactcagaaatcattttcatccaattagtgaatgtcatttcgggtgtccccgccaatcagcgccattaatcgctaaccaactcattgttagagctctcttccgccacagctctccatgatggatccgccgagcccggggcggcatctgccctgcgccaacgtcgtgctcttcgccatgcaaatcgccatcgtcattggcgtctacctcttcgcccccgcgggctcctgggcgccctccaaggcgccaggctcgcacgtcgcggcctccggggcctccgacagcagcggctcgctcgctctcgtgcccgccgccacgccctccacactgacgcccaacaacccgctggcccctccggcctacgtgttctacatctgggtgcccatctacgtcttcacgggcatcaccgtggccaccgaccgcttctacccggcctacagcttctacctgacgtcggacgaccccagcttcctccgccaatggtttctgctcgcttgcctcgccaacatggcgtgggtcgcgctagacatgtggttcagctgggtgcacatggcgacgttcgcgttcggagtgctctggtgcaccgtgctaccgctctacctcttcgtggtgcgccaccctacgccaagatattcgcaggcctggatctactacttctgcagcgagttctcggtgcgactctacttcggatggctcagtgccgacgtgatcttcgggattgccgatgtgatgcagtatctgcacggagcctacttcgggttcagcgtgtacgcgatgctgttgggggcgctgctagtgttggcgttcggcacctacgtccacggccgagaccccgttgtaggcctggttgtgacgtgggcgttggttggtcttctatttaagcacacgacgttcccaggggagacgcaggaggtcttcgaaaaactgcaggctgtcgccattgtcgtcgcgcccgttttcccgattcttgtgttcatcgacagcgtccgatacgtctacgtcgtccattggaaaaggtaagttttgtgcgatgatgatctatactgaattgagctcacgttagagatgtatctgcttgcttgtttctacagtgcaagggttccaagtggtagcgacgagtactacaagccatttgtatttgagacgacggccgagtatgggacggtttgatgtgtaggcgaagtgcacatttgtttatacagaagtcgcccggcatttttgatccactcttgcaccgtgtacctcctatctttggttcggtccgggctcatccagtgcttcgcctttcaactgttgaggtctgtagttcaagctgtgcaggatcgacgcagcaacagcatccaccttggggttgtaactcgagtaataagctttgaagacgagcgtcaacagcacgaaaaacagggacgaacgtgtagacttgaaaggtgcacgacgtcgatagcaataaagaaagctatagccgggagacaatctgcttgttatcatcaagctgtactgtagattcgctgatatttcaaagtgcgtttacagaggccgacattgatcagccagggctgtggaaatatagattcatgctctttcgtaagacgatacttagccccagagagcctaccgtaagacaaagcgtcttacgttttgcaatcaacgcattttggctacatcttggttttagtataccagtggctacattgtattttgtccgtcaaaacgtaagacagtttgtcggacaacaatttgcaccatgcgattggccaaaactttcagagggtagtgtcgttgcgtgcgttcctccgttgagcatgtaggaacccgaggacaaccgctttgccgtttttgaattgctcgtgccacctacagtcgagccgacgaaataaggcgctcacaagcacgaacatgtagtcggtagtgcggccctactgccaactacaatgtacacgctagtttgagaatggttaagaaataaatgcacccgaaccattagcccagcttgacaaacaaaacgttcagggctttatagtgaattctagttaatgcataaccaaatagagcccctcttcctccggtagtgcggcccacgaaccctgtcgtgtcctctgaggacgcctccgagcgaagcagtgcacgacgagcgcgcacacatgctccgcaccgaggcgttgtcggaggacgcgagggagtagacaatcaatacattatgagatcttaccaaagtcatgaaatgaactgttttgtagtagcaacaaggcagcgtcagccagtcttggtatttgtatttgtatttgtatttgttggggtttgcttggctaacttactcccggaggcgcacactgctgcagctccacctacgtcggtagtggacaccaccgacctcacccgcggccacgtgtaggtaagctgttgttggtgtcgcaaacaaataactacaaaacgacgtgagggcctctaagagtcaaatgaacggcgaaacttctcgggaatacatgaaaatgccaaagctaaagtaattgatcagcccggctgaaggcgcttaccagtttgctcggcctgctactgtagtactaggaaatctaaacgatctaagctcgccgtggtgttttaaatatgtagagggagtttgttggtgtcgcagcgctcctccgcacagttctatcaaaccgccaatcattactaccactactatgctgcgcccaatattagtcaggatacgaagtgcaacgaaatgcatcaaaaagagcagcgaagaggaacgcgggccttcctagcagagcctgcgagcactctgcgcctggcagtgccaacagaattggcaagtcgtactattcgccaatcaaatcactaaatttgatttgtcgtcaaactgtcttacgaatgctcgacacaagtgattgtttattgattgacggctcagatctggaacaatcaattattgcaatctcaacaatctcacaaacaaaaagattgcaatctaagttctcgcttgtatttcctctgctacgttcatatttttattggtttggcggcgctatcgctctaagacctttgcttgtgcgattacatttgtgttgagattcaaaaaccttggccaaatgcaatgttgggtcttttattcataatgttgagcgtgcaccccatccaggcatccaatgacacctcatatccgcatttcgaagcagcagaagacacataatggctttttaggagctaggatcggttgcataggcttgacgttgcatatttctctaccggatcgctggcaaaggctcaaaatcagtataggaacaatatgggaacgggattgccgattgggatcgcggagcaatcaattattgtgattgacaatctcggcaatattacaatcgcaatcattttttccacagctgatcaatgctcagctgagctgaatatcgtgctgttggtgcaggtgggcgcaaactacagaatctagagaaacaggcaacggagggaatgggtggaacgtgaaccatattctcgtcatcgtaacagaccctgcagcagactagtacgagagccctcaatgggacaaagtaaattacaagaaccagggcgtagagtccatggtccggcaatacaccagcgcaaagcgcgtacaatgcgcgaattggtagcgcgacttttcttttgctatctcgcggccgcaaccatctaccaccgacgcgatgcagtacagtagctcaacagcgactacttcagcactgcatcgattgatccaatacagtcacgaagcgactatcattgtcactataccaagtccgtgctgtcgattagctctccgtttttcgaagacaaaatgtttgcgtggtcacgttatagtttccaggatttctggtgtggaagtacatctgagatattgctaatacaagtgagactgccattgaggcgaagggctttttcgttcgacttcacggtgtcaactgctccatatattggtacaagcagtagacccaaacatcttgtacacaactagggaccacgaagtgatcgctagttgtgcctggttccgagaagccgatgctcggaagttgagcttactctgagtaagataactccgcaatagtagcccctcgaagacactatcaagaaggaaatacaggttcagtgagaggacctaccctccgcctaaaaaggacactacaaacacctaaactgttctatcagcactgtaaaatatcgctgagcacacagttatcactgtgtaccacatgagttgagcgactgacactgaataaggggttggctcgcggcattgtggtatttttcaccaatcaaaactagtaaactaaccagagcatgctcaaccgaatctcattttgctggcacttgcgatcttccctaaagccagcaagactcgcccccccctcgctgttacgccaccaccaccaagatgcctcgccgcctgccctggcagactctagcgatcgcgcttcctcgcgccgacgccgaaatcctcctcgacacctttaagaccttcaagattgtcaagagcgacctctacatgtgcagcatctgcgcgatccccaccccgcatgcaatgcgggcccagctgctgcgatgtgcatgcgcctcttgcgctgaagcttcgccatgccagccgtgcccttggcgcggacgcgtacgcacgtgccaggagctgaagcttgtcaacatggacgagttgtatgcgcacgtgacgcctctccgctccccgccctcggcgccacgcctaacgcccgcaatgaaggaggttgcccaagactgggcggcgcagggcctcaagccgctgcggatttggaacggcctaatgcggcgcttgcgcgagatgccggctttggcatcagtccagcggctcgtccaccaccacgtgacctcgcgtttgggtggcagcgacctccttggtgctgtgcgattgaagattcgagccgctggctatactggccaagaggacgagacggctgcattcacgtttgcgtggcgcagcaactcggagggaaagccggaggttggaaatgggacggacagaagccctttcatcgttggcatctcctccaaaatgctgcttcgccacgcggaccgggacccggctacgtttgtgctccatgtggatgcaacctacaagctttctcaagtcggctaccccgtggttgtggtggggatctcggacaaggctcggcaattccatctccttgccgtctttattgtctcttaagagcgagaagagcagtacacggaggttttctcggtgctgtgccgccttttccaatcggtcacgggcaagacgttgcgggttcgtttcgctatgggagatgctgatctcgcgcagtggaacgcgctacaggccgttttcggtgtgagtcaggacttctgcttcctgttgtgtttttttcatgtcgccaagaaggtgtacgaaaagacacgaggtctagatggcagtgttgcagtaatggtgatgtcccatcgccacgagttgcacttcacgaggagcgaggacgagtacaacaaaatgctcaagaaaataaaggaggagtggtcgaagtggactcaactgagtcggttcaaggcctaccttgaaaaggcgtggctgaacgtaagggtgtggaggtggcaatgctttcacacgccgagcggctttgccaccaccaacaacccctgcgagtcgttcaatgccgccatcaagcgcgacgtcactttgcgtcggaagctgaaggttggggcgctggtggagcagctgatggtgctgtgcacaagtgaaagtgtgcgcgcgcgccaattcgctgcgtcaacaaccttttcggagcgtctgtgtcgccgcgctcgggcaatgacccgccaggggctactctacgagcagcagtacgagcgcaccagcattgccttcctgctgagcgatgcaccctccgagcagcagagcgacagcatgaacgtggtctcgatcccctgcacccgcatctttgatgtcctggaccgccgctcgaaagaagaccttcctgcgtctgctcagctaaacgtcgagactgcgaagatggagcaccgcggaatgccaacatgcggttgggaagtcaatgttgccgcgcgcacgtgcccgtgtcgttttttcatgaagcacggggcctgcatccatctcctgtactgcctaaatgcggttggaagccttgatgtaaagggacgtgagactctgttctaccgcggaaccaacaagcgcaagcgcgctgcggctgctgatgaagctgctagtcaggctgctggacggcctcgacacaatgggcaagcgctttcaatcgagtgagtgtcaacaatgtagaccagaagaattagtcagtcacagagtaaatttaattcatacctggttgttcatcagtgctctcacaaagttgcagccgctcgccaccccaagccgtatccccgtagtgcgcggccactccgtagttctctgctgttttacgacgctcgaatgctgtggggtggggagcacctacgtggcgagcactgcctatgtggtgctggcctacgccttcgccacgcttcacacctctgctccatcatggcgctccacgcctcctctctgctcagcacctcctggtctgtagagctcagcccctccttcccgttctgctaggccttgccggcctgcttcttcttcctgctccgctcctccttcctgatcagttccttcttcatgttctgctccttcttcttcctcgctgctctgctccttcttcctgctcagcccctccaagcaggtggcgtgtagctcctccaacccggtaacgagcagccccttcgcgcgatgttccttcgtccggcgacgtcttcgtgggacttggcgccttcgttgcgctcggctcctccgctgcgctcaactccttcgggtcagcggcgaccggctcctctgcgcccggtggcgaccagctcctcccaggggcaagcagctcctacgggtcggtgcgtggagctccgctcctcgtgcccgacgctgtcttgcagattggtgtcgggcagctgtcgcatcagcaacaggatgtccggcttcttggtcttggcggtggaaggcgaggcgagcactcgctggccgtggttgtcactacagcttcgcagcacttgattctagaatgagcactgggccacacaacgggatgtaccgcatatttggtacattcgaggccaaggtggatacacgagggtctgcaacctacaacgtggcaacactgtcaatgcagatcggctggcctgtctctcctttcggtgctggtagagcttttgcagtgttgggctgagttcctacaggtgtttatggcattttctcgttcagtgatctgtcagtaaccgatgtacctgcagcaatctatccagtttaacatatcacaggagtactgttttaaggctattatggtttgtttactgtcgtttatggtatcttcatgggccatcataacgatttcatgcatatttacggatttttcatgtgtttatacattctccattgcctttacggattcttcatatgagtaattcataagctttatggaatgttcataccgataaaaagaaggtgcacccaagagcaattaaacaatttaatgagattgggccattttggccaaacgtaagtagattgatgtactacttataagtagattcaacgtccaatctacttatccgagaaatgggtaatttccaatttagttttaggcacgtggaaatttacgactcttttttatgatatacacgtactcgcatttattttgtgtgacccattggtttacccattgttaaactaccgagtcgtaaattttaacgcgcgccaaaaattacgactcgttcattgcgtcaaaacttacgactcgttgactgcgctaaaactaacgactcgttcatttttacacaagtcgcttcactattcgtttcgttcggcagggtacgacacgggccgttgtgactttaaatctaccacaatcgattctaactatatctactccgctacagcctagtcttttttggttggtttcgaaacttacgcttgcgcttcaacgggcgtagtcggtcctctctcgttttcctattcgcatcattcaaaacacccgacttacctcgctcgccaccaagcactccgacttacctcgctcgctaccaagcaccaacttcggctcgcgatggatgctaacacctcttccagcattgtggagaccgtcagccttgaggaacttcggacactcggcctcctacgtgatgacgctgacgtatcgatggatcgcgctgctccgagcacgtacgaccacgtgtctgaccatgggcagaatctcgtgccggcgacattcgaatcgagggtggtcctgcagcaatgctgtcgtgaattcgccaggcgccagggcttttcacttcaagttgccaacaatagctggcgcaaaactactcgggagggtaacgccaagtacacctgcaagcctttgaaggggcaacaaccgctggccccaggaaacaaggcggcctgtccattcttcttcacggtgtacgggcttcgcgatgagtggaaagtcacccagatgtgcctggcacacaaccattaccgccacgctgggttccaaggcgacgtctttgttgagggcaatcttcaaggggattcaatgccacagcgccaacgagatgttccatacagcatgatgcgtggggttttagagcgggaaatgttgccggcctacagcgacacctgggccaacgtgcctggtagggccatcatggactttcttatgtcaagtcagatcataacaaaccgccagacggcctcgagactcaagttggatctcctcgagtttctacgcgatgatgttctggcaagctatcagaaactggaggcttatcttcggatggcgacggacgcaaacgcaacctccagctacgagtttgaaaaacgagaggatggtgttttcagtcgcgcctgcttcttcccaggggcttgtttgaaggccatacagcactccaagcgtgtcatcggcgccgacggaacgcacttgaagggggacatgaacaagcgcggcgtcttccttctggcaaccaccaaggaccgcaatgatcacatccttgtggtgggactcgctctagtgagccaggaggattatgcaaacgggaaatggtttctctcacacatgaaaacggcaatcagtggtgttgacgcaccatggaaacccgtgttcgcgtcagaccgacagaagggattacttgccgcagtatccggactccggccaccgcttctgcgttcgacacatcatatccaacatttccaagcgaggatcgtcgctgacacctactgagcaatcgctcgtgtttcagatggcgagaagtgaatgcgaaaacgactacgagttctacagctccaagttggcggacacccgacctcaagccgtggagtatctaaatggaacagccaaggagcactgggtgacgtatgcttttaacgaggcgtacaatcagccgtcgtatgacgagatcacctccaacctttccgaggctgcgaaccattggctgggcaacccctgtcgttcgagctaccccctggaggcttttgagcaatacatgatgaagctggtggaacagtttgcagcccaccggcgtgaagcatccaaggaccgccgacaccgccaggaacgagcgtaagtccctggcactggcgacgacagcgtcatccctacgctggcgtcgttttacaacgacaagctgacagcgatgatgcctatacgaatgtctccacattctcccgtgtctggacggccagtatatggttcgcttcaccgacatcagctccagaccgggccacgctcacatgtggcgcacctcaacttggtcgagcgagagtgcacctgtcgcaggtggcaggatgagaacttcccgtgcgtgcacgccgttaaggctgccattcaccacggtgtgcacgtcactcaactgtttgatgtggagatgttcaacaccgctaccgctgtcaagacttactactaccaatttgtccctgtgctccgctcagcgactatcgccctagatgccactgtacgcgttccagaggtcgttgttatcgaggaagatttagggtcgaggggccgcaaacccggtcccaaaccaaagcacaagcgcaaagttgcgagagtaggatccgtcagcacggccacggttgctatgactcagtagtctttgccagccagtgggcttcttttttaaacttgcatatcgatacatacttctctttcccattatcacacgcgatgaattgttctatacatctagccgaaagtactgaaagcatagataatagtcggatcgtactgtttcacgaaagtttagtcgtacgatttcactaatagctaagtcgtacgatttcacaaatagccaagacgtacgatgccattaatagttaagtccaacgatgtcactaatagttaagtcgtacgatttcaataacagttaatcgtacgattcgctaatatttaaggcgtaaatttcacttatagtaaaatcgtacgcttgtactgataattgtcgtacgatttgactaatagtaaaccgtacaatttgtttcaaagtaaatagtaagattttcataatatctatatttcaaaagtgttcgggttttatcattttcttaaagttaaagttaagcgacgataattatatgatgagcaagtagcaaattcaagaggaaaagtaacatatattttttaaactcagttgcaggaaaaaaaactatctagagcgtgatagcgacgcggcactgcgggcatcgaggcgagacttcttctgccatgcaatgatccatgagacatacagtcagagcacatagcgtgctggcaggatgttgggcgaacaggttcctcgagagtgtcttggcacattacgcatatgtcggcatcagtagcattatcatttgcagcgccatcttcatcttcgtcgtcactcgtgatatcgataatttcaggaattgtcgatgctacggggacagacgaggggctggctgggattggggcgacggcggtccggctgagtaggtctgctggcgcctccgtaactgggacggatctaggcggagttgcagggcgggtctccagctgaattactcggtttccgagcaacagaagcgcttcccggcgggcttgagcgtatcttcggtcgtaatccttcttagcccgccgggcgagctcctcgcgccgagccttcagctgagggaacttccgctcgaaacaaccgcgtgtgccgatgtgtccacggacactgcttgcggcgaggtcagtgccacacaaggggcagtcgacacgagtaggaggtatcgtaatgcaaaatgaaaccaattccttatttcgatctagtatagcttgaacgcttcagctatttattcgtattatttttttatccttatccgaggatgacactacccatttctcggataagtagattggacgttgaatctacttataagtagtacattaatctacttacgtttgaacaaaatggccccaatctcattaaattgtttaattgctcgttcacccaacggctatgtgcgacctttgagcccgctcggctgcgctgtaggccagttgatagacccgtctctcctccgcgtgtcgagcgtaatacgccttctggcgttgcagccgccgcgccctatcgctctgatagacttgaggtttgtatgtggactgggttgactccgtgtttctatataagtgagggcggcagtctcagcttggcgccatttggaaatcttcccgcaagctaccaagccgccatgccgccccacactgcttcctcgccccgcgccgacacgccccgcggacccggcactgtgaacatcacgttgaggtgccgcggcgtgaccgaagtcatcgagaacgtcagcgtccggtggactatgggggcgctatgcaagaagatcgccaaggcgctcaaggagaccttcggcatcgacgccatccccgcgcagctccgcctcaggacgtacgtcaagatcgacggcgagtggccgaccgaggaagcagccgaggacgctgcgaaccgccccaccgtgattggcaagtctgtgtccaccgagctcgagggtattggcgctgagggccgcgtgcacctgctcgtgacgatgcctgcagacggtgatgataaagaagagaagcccgccgcagcagaagagaagagcgatgccaaggacacctcggcagaggacggcgacatcagcgacgtcgagacggccgtagcccgcttcagcaagcgggtcacggggcgcaatcgcaagcgcaagacgtccacggcggactccacggaggatacccgtatcgcgttctccgacgtcacggagacacaggcgaacgcgatgtacgagagcatggacagggataacaactacgacattaagacgacgacgctaacagaggagctcaaggcggggatccgggaagactacgcgcgaccggtcggaccgatgctgccttcgtggagcagaaagaagtgcacaagcggcgctacatcgacgcgatactgagccgcctgatcttcgctgtgaacgagagcaccggtgccaaggacgaagccaccaagctactcctgtttcctgcgtacgggatcgcgctcccggagctgaacgcgtctggagctgcggactgggtgatcaagcgcagcgaccggatgcttgtcgtcatcgaggccaagcagtgcggcatcaggaggggccagtatcagctactcgcgatgatggaagccctccgtatccacaacaagaagcttaaaatcaagcagaccaaggtccaagccatctgcaccgacttccagaactggttgttcgtggaacggaagtcgagaactctgcggaagaaacgcaagggcacggtccctgccaccactaacgagcttgatgagaatctgctagatatctgtgagcgtgtgtacaccatgttgttgaatttataatatattcatgaacgcttatactttcttcttcatcgcttatgctttcttcatggtcggtccgtaaagaatccgtaagcattatacatgctttatactagagacgtaaagaatccgtaaactcgcgtttccaccaccttccaccacccggtcctgctgatgacgctgctctagatcaggtttggttcactgtaaaggggttccacctcttccaccggtggaaaccacatgtggcgacctcactcgaagggtaagggcccttaccccccccccttacccccccttatttttgtcatttgatttttaggggttaaaggtagtggaactagtggaatgaggtctaaaggggctggcgatgtgttagagctcgtgaaaagtggtggaacagggtggtggaaggtggtggaagtggtggaaacacaggtttacggtttcattacgcctctaccataaggaatgtataaagcttacagattcattacggatcgactatgaagaatgtataaagcgggtactagtggacttgactaaccctgatattgagcagcatccccagcaggacgttacacgcggttgtaggctatacctgtcatgtggctatggaacagttgcgcatgcgcgcggtccctctccctgaccgtcatcctatgatacgcagcagatgcttgcagatcagactcgtggatgtggcgcatgttggtaaccgtcagcggtgtcccagcataggcgctgaagatgcgtggcagacggcgcgcgaggctgttgcgtgatgcgacgtgcgtcagtctgttctggcggaaagacaagatgaacaggtactctacacgatcctgtagccgttggagcacccgtaaccatgcggataggacgtacgcaaggtcccgcctgacctcaatcgtggtctttcctatgtggcggctgttcttgaagtcctgcatgaccacccgaaacgagaacagcggccctgccttcttgaagtacagccagttgccctcggatgggatggagcgcagcctcgaggtcaggtgtagcgagcttcaatcagcgcggagagccggttgtagggtgtaacacgccatcaatgcgatgcgctgcatctccttggcaaatcgcgtcgcattcagcttcttcccacgcatagccaccagttcgttgaggttcgcatccgttaacagcattagcgggagccttatcgcgtgaatagacgctccatcgcatcggctatcacgacttcaaggtcagtaagcgatcggtaacgctcctgctgctcatccgtcaggcggttctccactggattcctctgcatagccacctccagccgctcgatcttgcgcccgtatgtacgcttgctactggctgtgaccgcgtccccagcggctttcactaacgcaatcacgtgacaccaccttgaatactgggtgcgaagggtctcggagtcttccacgcggctgaccaccgcccttgtacggttcagaaacgttaggtcgcgtgcgttgcgcaccacatcagcaactgacttgaggaagcccacgcgtgccttcaacagtactgaactggtggttgtgggtgccaacgcatccctgatgaccgtctccatcgtatgctatgtataaggcgcacaaaaaaatttctaagagcatcctaaaacgatctgctcgaccggaccttgacgatccaatagtgagggtacgatgccacggatgggtgcctattgcgctccgtgattgctgatggtttcattgcaatcagtatggagtcggtccggacaagtgggatcggctcaggggtcgcggtttcgccatccaagggcatctgttgactttcccttttttggtccatcgatgtttttattgctcttgtatatacgaccaaataacaaaattgtggttatcgcaaattaattagtgtataaaagttcgtacttgggcggagtatccacttgggtactagggctccgcgaaggctgggataggaggtttttggtataaccgctttctattattatgagtattttttacgaaccacgggcatctcctgcgcctgcttcgcagccgcagcgtctgcccagtaattcacctcaaaactgtagatagtgcttatacacagtgataaaacgaaccttgctcgagatctgtttgtagcttgtagaaaatgaaaatgtttacctttgtatgcttctgcagcagttcgtccgctttaatcattcacttttcttcactcctactattcgatatatgttactgactcataccggttcaatctgcccacgcttttggaggcccagtgtggccaccgcggccgtaccggtgtacttaagtaatgggttttctaccagttcagcttgcccacgcaaataaaccttttggagggcccagtgcggcaccggggtcacaccggtttcaggacaatgtaccagttaggtgtcaagaggggtcaccttttgacttgacgtaccacggatataatcctgtttggtctgcgattgcagcactaacgttgcttcctatcccagtataaccgtcattactgatttcatcgatctaccgtgcaagtgcccgaggaagggcgcacagcatcgcagtcgacagccgcgccacaccagcagcagccagcaccaacgcccgacccttcgctgcggtcgccgcccaactacagaggtagcctcattactcaactcgccatgcagcgcttcgaggaggagaacggcaagctaatacgctaccacgtgtttgactgcgctacccaagagagaggcttcccgcgcgacaagctcttcctgacctacactcgctatgtgatgctcaacggcaccgtcaaggacgagatcgacggcaagatgtgcgggccggaggggctcgtggaagctgctctactgcttgtacgaccgaacggcggactccacgcccgagcaggacgtcgtgtttgacgccgtggacctgtgcttcaagtccgaggaggacagggaggtatccgagggcgtcgtgaagaaggcggagaggctgtccaacgcggagctgtgcctcgcggcgcagcgctacgaccgtaggctctttgacctgtgctgcatgctgccccagacgtggctgaccaaccgcgagaacgtctggcagctcgccggcttcttctaccgccgcccgcacgttggccgcgaggtcatgcgatacacgttcgtgtgcatcctcgcgcatgtgcgtggctcctacttcgacacagcggccgccctcgcagcctttaacgactggaagaaccccaagtagcaccccaagctgacggagggtgtcatcaagaggatcgtcggcggcgccaacccagccgggtaccgcaaatgggcagagcgctgcgagcgcaacggcggctgcatggacgacatcggcgacgtcaaggacctcgacagcccgaagaagctgaaggccgccatgctcgaggcgctgctggacgagctcgagaaactgccgatgaagctcatccgcgaggacaacgagtacaccgtcgactcgctggccgaggcaaggaagtgggagtcgctcaagacgctggcctaccctatcaagtcgagctacgcgcacgcgagcaaccgcggcacgccgtacggtgcgtaccacctgaagaagttcgtggaggtcgtgcggtacggtgcccgtgactcggtgcgcgtcatcggttacgagcgcgccagcacgcgcagcaagaaggcggcgggggggggcgacactatctacagcgtgccgttcaggctgctgcagcgagacctgagcgacttcgactgccgccagatcccgacgaccaagtacaagcgcgagctcaaggtcaggctgtcgaaccacgccgtccgctacctgctgcaccgtcgcgagcagtggctggaggtgggcttcacggaggagaggaatgagggatcgagggagacgtacgagctctacaaggagtgagcggcgtgggcggacccgagtacggtggtcaagggtgaacaggtgtttggcacgatgctgaacaagctaggcttcacgctcaacaagggcgccaaggtctccggcaagacgatcaagcgccgcacgttctctgtggacctgatcgaactgaacctggagccgtacatcatcgctgacgagacggttcgagtcagccagctgcttgacatttttgtttttggaggcgggtagctcccggcctggcggttcgaggcttcgggtatgtgaggcagtggaccatggcggagcgcggagaatcgacaaggcgtggatgctggcgcctcacgggtgctaatgtgctggtggagaggacgatcgttgtaatgggtgcggaggcttgcttggcgatgtgtggagggatggcgctgtgaggcggttgtgtgtggttttgtttggtgtgttttgtggcgagttggcgtgtgcgtgtgtgtgtgtgtgttggtctgagcgcgtcgattgcgttgcggtttgggtttgtgtctgggcgcttagctcaaatggtagagcacccgcttcgcatgcggatcgatacccccagtgtccacttttacggcacacaacactttttacgaacaaacactttttaccgcccctcgcgccgctgcttgcttcctagccttcctacccctgctcacccgccacccacagctcacccgccatctgcgagcgtgctggtgcctacgtttacagacgacccaccttttttgtcggcgagtgtggggcaaccacgccgactgccaggcgcaggatcccacaagagtttgggcatgagggagaccggctaaacagctcaccgagagcctggtcagcgccacagaccaaacgcccagctgtgtgctctgtgctctgtgctctgtgctgtgtgtcacctctgtccgggccactggccggtcggacgagtagggttcgagtcagccagctgcttgacatttttgttttcggaggcgggtagctcccggcctggcggttcgaggcttcgggtatgtgaggcagtggaccatggcggagcgcggagaatcgacaaggcgtggatgctggcgcctcacgggtgctaatgtgctggtggagaggacgatcgttgtaatgggtgcggaggcttgcttggcgatgtgtggagggatggcgctgtgaggcggttgtgcgtcgttttgtttggtgtgttttgtggcgagttggcgtgtgcgtgtgtgtgttgatctgagcgcgtcgattgcgttgcggcttgggtttgcgtctgggcgcttagctcaaatggtagagcgcccgcttcgcatgcgggaggtagggggatcgatacccccagtgtccacttttacggcacacaacacttttacgaacaaacactttttaccgcccctcgcgccgctgcttgcttcctagccttcctacccctgctcacccgccacccaagctcacccgccatctgcgagcgtgctggtgcctacgtttacagacgacccaccttttttgtcggcgagtgtggggcaaccacgccgactgccaggcgcaggatcccacaagagtttgggcatgagggagaccggctaaacagctcaccgagagcctggtcagcgccacagaccaaacgcccagctgtgtgctgtgtgctctgtgctctgtgctgtgtgtcacctctgtccgggccactggccggtcggacgagtagggttcgagtcagccagctgcttgacatttttgttttcggaggcgggtggctcccggcctggcggttcgaggcttcgggtatgtgaggcagtggaccatggcggagcgcggagaatcgacaaggcgtggatgctggcgcctcacgggtgctaatgtgctggtggagaggacgatcgttgtaatgggtgcggaggcttgcttggcgatgtgtggagggatggcgctgtgaggcggttgtgcgtcgttttgtttggtgtgttttgtggcgagttggcgtgtgcgtgcgtgtgtgtgtgttgatctgagcgcgtcgattgcgttgcggtttgggtttgtgtctgggcgcttagctcaaatggtagagcacccgcttcgcatgcggatcgatacccccagtgtccacttttacggcacacaacactttttacgaacaaacactttttaccgcccctcgcgccgctgcttgcttcctagccttcctacccctgctcacccgccacccacagctcacccgccatctgcgagcgtgctggtgcctacgtttacagacgacccaccttttttgtcggcgagtgtggggcaaccacgccgactgccaggcgcaggatcccacaagagtttgggcatgagggagaccggctaaacagctcaccgagagcctggtcagcgccacagaccaaacgcccagctgtgtgctctgtgctctgtgctctgtgctgtgtgtcacctctgtccgggcgggttcgagtcagccagctgcttgacatttttgttttcggaggcgggtggctcccggcctggcggttcgaggcttcgggtatgtgaggcagtggaccatggcggagcgcggagaatcgacaaggcgtggatgctggcgcctcacgggtgctaatgtgctggtggagaggacgatcgttgtaatgggtgcggaggcttgcttggcgatgtgtggagggatggcgctgtgaggcggttgtgtgtggttttgtttggtgtgttttgtggcgagttggcgtgtgcgtgtgtgtgtgtgtgttggtctgagcgcgtcgattgcgttgcggtttgggtttgtgtctgggcgcttagctcaaatggtagagcacccgcttcgcatgcggatcgatacccccagtgtccacttttacggcacacaacactttttacgaacaaacactttttaccgcccctcgcgccgctgcttgcttcctagccttcctacccctgctcacccgccacccacagctcacccgccatctgcgagcgtgctggtgcctacgtttacagacgacccaccttttttgtcggcgagtgtggggcaaccacgccgactgccaggcgcaggatcccacaagagtttgggcatgagggagaccggctaaacagctcaccgagagcctggtcagcgccacagaccaaacgcccagctgtgtgctctgtgctctgtgctctgtgctgtgtgtcacctctgtccgggccactggccggtcggacgagtagggttcgagtcagccagctgcttgacatttttgttttcggaggcgggtagctcccggcctggcggttcgaggcttcgggtatgtgaggcagtggaccatggcggagcgcggagaatcgacaaggcgtggatgctggcgcctcacgggtgctaatgtgctggtggagaggacgatcgttgtaatgggtgcggaggcttgcttggcgatgtgtggagggatggcgctgtgaggcggttgtgcgtcgtttcgtttggtgtgttttgtggcgagttggcgtgtgcgtgtgtgtgttgatctgagcgcgtcgattgcgttgcggcttgggtttgcgtctgggcgcttagctcaaatggtagagcgcccgcttcgcatgcgggaggtagggggatcgatacccccagtgtccacttttacggcacacaacacttttacgaacaaacactttttaccgcccctcgcgccgctgcttgcttcctagccttcctacccctgctcacccgccacccaagctcacccgccatctgcgagcgtgctggtgcctacgtttacagacgacccaccttttttgtcggcgagtgtggggcaaccacgccgactgccaggcgcaggatcccacaagagtttgggcatgagggagaccggctaaacagctcaccgagagcctggtcagcgccacagaccaaacgcccagctgtgtgctgtgtgctctgtgctctgtgctgtgtgtcacctctgtccgggccactggccggtcggacgagtagggttcgagtcagccagctgcttgacatttttgttttcggaggcgggtggctcccggcctggcggttcgaggcttcgggtatgtgaggcagtggaccatggcggagcgcggagaatcgacaaggcgtggatgctggcgcctcacgggtgctaatgtgctggtggagaggacgatcgttgtaatgggtgcggaggcttgcttggcgatgtgtggagggatggcgctgtgaggcggttgtgtgtggttttgtttggtgtgttttgtggcgagttggcgtgtgcgtgtgtgtgtgtgtgtgttggtctgagcgcgtcgattgcgttgcggtttgggtttgtgtctgggcgcttagctcaaatggtagagcgcccgcttcgcatgcgggaggtagggggatcgatacccccagtgtccactttttacggcacacaacactttttacgaacaaacactttttaccgcccctcgcgccgctgcttgcttcctagccttcctacccctgctcacccgccacccacagctcacccgccatctgcgagcgtgctggtgcctacgtttacagacgacccaccttttttgtcggcgagtgtggggcaaccacgccgactgccaggcgcaggatcccacaagagtttgggcatgagggagaccggctaaacagctcaccgagagcctggtcagcgccacagaccaaacgcccagctgtgtgctgtgtgctctgtgctctgtgctgtgtgtcacctctgtccgggccactggccggtcggacgagtagggttcgagtcagccagctgcttgacatttttgttttcggaggcgggtagctcccggcctggcggttcgaggcttcgggtatgtgaggcagtggaccatggcggagcgcggagaatcgacaaggcgtggatgctggcgcctcacgggtgctaatgtgctggtggagaggacgatcgttgtaatgggtgcggaggcttgcttggcgatgtgtggagggatggcgctgtgaggcggttgtgtgtggttttgtttggtgtgttttgtggcgagttggcgtgtgcgtgtgtgtgtgtgtgtgttggtctgagcgcgtcgattgcgttgcggtttgggtttgtgtctgggcgcttagctcaaatggtagagcgcccgcttcgcatgcggatcgatacccccagtgtccacttttacggcacgcaacactttttacgaacaaacactttttaccgcccctcgcgccgctgcttgcttcctagccttcctacccctgctcacccgccacccacagctcacccgccatctgcgagcgtgctggtgcctacgtttacagacgacccaccttttttgtcggcgagtgtggggcaaccacgccgactgccaggcgcaggatcccacaagagtttgggcatgagggagaccggctaaacagctcaccgagagcctggtcagcgccacagaccaaacgcccagctgtgtgctgtgtgctctgtgctctgtgctgtgtgtcacctctgtccgggccactggccggtcggacgagtagggttcgagtcagccagctgcttgacatttttgttttcggaggcgggtggctcccggcctggcggttcgaggcttcgggtatgtgaggcagtggaccatggcggagcgcggagaatcgacaaggcgtggatgctggcgcctcacgggtgctaatgtgctggtggagaggacgatcgttgtaatgggtgcggaggcttgcttggcgatgtgtggagggatggcgctgtgaggcggttgtgtgtggttttgtttggtgtgttttgtggcgagttggcgtgtgcgtgtgtgtgtgtgtgtgtgtgttggtctgagcgcgtcgattgcgttgcggtttgggtttgtgtctgggcgcttagctcaaatggtagagcgcccgcttcgcatgcggatcgatacccccagtgtccacttttacggcacgcaacactttttacgaacaaacactttttaccgcccctcgcgccgctgcttgcttcctagccttcctacccctgctcacccgccacccacagctcacccgccatctgcgagcgtgctggtgcctacgtttacagacgacccaccttttttgtcggcgagtgtggggcaaccacgccgactgccaggcgcaggatcccacaagagtttgggtatgagggagaccggctaaacagctcaccgagagcctggtcagcgccacagaccaaacgcccagctttgtgctgtgtgctctgtgctctgtgctgtgtgtcacctctgtccgggccactggccggtcggacgagtagggttcgagtcagccagctgcttgacatttttgttttcggaggcgggtggctcccggcctggcggttcgaggcttcgggtatgtgaggcagtggaccatggcggagcgcggagaatcgacaaggcgtggatgctggcgcctcacgggtgctaatgtgctggtggagaggacgatcgttgtaatgggtgcggaggcttgcttggcgatgtgtggagggatggcgctgtgaggcggttgtgcgtcgttttgtttggtgtgttttgtggcgagttggcgtgtgcgtgtgtgtgtgttggtctgagcgcgtcgattgcgttgcggtttgggtttgtgtctgggcgcttagctcaaatggtagagcgcccgcttcgcatgcgggaggcagggggatcgatacccccagtgtccactttttacggcacacaacactttttacgaacaaacactttttaccgcccctcgcgccgctgcttgcttcctagccttcctacccctgctcacccgccacccacagctcacccgccatctgcgagcgtgctggtgcctacgtttacagacgacccaccttttttgtcggcgagtgtggggcaaccacgccgactgccaggcgcaggatcccacaagagtttgggcatgagggagaccggctaaacagctcaccgagagcctggtcagcgccacagaccaaacgcccagctttgtgctgtgtgctctgtgctctgtgctgtgtgtcacctctgtccgggccactggccggtcggacgagtagggttcgagtcagccagctgcttgacatttttgttttcggaggcgggtggctcccggcctggcggttcgaggcttcgggtatgtgaggcagtggaccatggcggagcgcggagaatcgacaaggcgtggatgctggcgcctcacgggtgctaatgtgctggtggagaggacgatcgttgtaatgggtgcggaggcttgcttggcgatgtgtggagggatggcgctgtgaggcggttgtgcgtcgttttgtttggtgtgttttgtggcgagttggcgtgtgcgtgtgtgtgtgtgtgttggtctgagcgcgtcgattgcgttgcggtttgggtttgtgtctgggcgcttagctcaaatggtagagcgcccgcttcgcatgcgggaggtagggggatcgatacccccagtgtccactttttacggcacacaacactttttacgaacaaacactttttaccgcccctcgcgccgctgcttgcttcctagccttcctacccctgctcacccgccacccacagctcacccgccatctgcgagcgtgctggtgcctacgtttacagacgacccaccttttttgtcggcgagtgtggggcaaccacgccgactgccaggcgcaggatcccacaagagtttgggcatgagggagaccggctaaacagctcaccgagagcctggtcagcgccacagaccaaacgcccagctgtgtgctgtgtgctgtgtgctctgtgctctgtgctgtgtgtcacctctgtccgggccactggccggtcggacgagtagggttcgagtcagccagctgcttgacatttttgtttcggaggcgggtggctcccggcctggcggttcgaggcttcgggtatgtgaggcagtggaccatggcggagcgcggagaatcgacaaggcgtggatgctggcgcctcacgggtgctaatgtgctggtggagaggacgatcgttgtaatgggtgcggaggcttgcttggcgatgtgtggagggatggcgctgtgaggcggttgtgcgtcgttttgtttggtgtgttttgtggcgagttggcgtgtgcgtgtgtgtgtgtgtgtgttggtctgagcgcgtcgattgcgttgcggtttgggtttgtgtctgggcgcttagctcaaatggtagagcgcccgcttcgcatgcgggaggtagggggatcgatacccccagtgtccactttttacggcacacaacactttttacgaacaaacactttttaccgcccctcgcgccgctgcttgcttcctagccttcctacccctgctcacccgccacccacagctcacccgccatctgcgagcgtgctggtgcctacgtttacagacgacccaccttttttgtcggcgagtgtggggcaaccacgccgactgccaggcgcaggatcccacaagagtttgggcatgagggagaccggctaaacagctcaccgagagcctggtcagcgccacagaccaaacgcccagctttgtgctgtgtgctctgtgctctgtgctgtgtgtcacctctgtccgggccactggccggtcggacgagtagggttcgagtcagccagctgcttgacatttttgttttcggaggcgggtggctcccggcctggcggttcgaggcttcgggtatgtgaggcagtggaccatggcggagcgcggagaatcgacaaggcgtggatgctggcgcctcacgggtgctaatgtgctggtggagaggacgatcgttgtaatgggtgcggaggcttgcttgacgatgtgtggagggatggcgctgtgaggcggttgtgtgtggttttgtttggtgtgttttgtggcgagttggcgtgtgcgtgtgtgtgtgtgtgtgtgtgttggtctgagcgcgtcgattgcgttgcggtttgggtttgtgtctgggcgcttagctcaaatggtagagcgcccgcttcgcatgcgggaggtagggggatcgatacccccagtgtccacttttacggcacacaacactttttacgaacaaacactttttaccgcccctcgcgccgctgcttgcttcctagccttcctacccctgctcacccgccacccacagctcacccgccatctgcgagcgtgctggtgcctacgtttacagacgacccaccttttttgtcggcgagtgtggggcaaccacgccgactgccaggcgcaggatcccacaagagtttgggcatgagggagaccggctaaacagctcaccgagagcctggtcagcgccacagaccaaacgcccagctttgtgctgtgtgctctgtgctgtgtgctgtgtgtcacctctgtccgggccactggccggtcggacgagtagggttcgagtcagccagctgcttgacatttttgttttcggaggcgggtggctcccggcctggcggttcgaggcttcgggtatgtgaggcagtggaccatggcggagcgcggagaatcgacaaggcgtggatgctggcgcctcacgggtgctaatgtgctggtggagaggacgatcgttgtaatgggtgcggaggcttgcttggcgatgtgtggagggatggcgctgtgaggcggttgtgcgtcgttttgtttggtgtgttttgtggcgagttggcgtgtgcgtgtgtgtgtgtgtgtgttggtctgagcgcgtcgattgcgttgcggtttgggtttgtgtctgggcgcttagctcaaatggtagagcgcccgcttcgcatgcgggaggtaggggggtcgatacccccagtgtccactttttacggcacacaacactttttacgaacaaacactttttaccgcccctcgcgccgctgcttgcttcctagccttcctacccctgctcacccgccacccaagctcacccgccatctgcgagcgtgctggtgcctacgtttacagacgacccaccttttttgtcggcgagtgtggggcaaccacgccgactgccaggcgcaggatcccacaagagtttgggcatgagggagaccggctaaacagctcaccgagagcctggtcagcgccacagaccaaacgcccagctgtgtgctgtgtgctctgtgctctgtgctgtgtgtcacctctgtccgggccactggccggtcggacgagtagggttcgagtcagccagctgcttgacatttttgttttcggaggcgggtggctcccggcctggcggttcgaggcttcgggtatgtgaggcagtggaccatggcggagcgcggagaatcgacaaggcgtggatgctggcgcctcacgggtgctaatgtgctggtggagaggacgatcgttgtaatgggtgcggaggcttgcttggcgatgtgtggagggatggcgctgtgaggcggttgtgcgtcgttttgtttggtgtgttttgtggcgagttggcgtgtgcgtgtgtgtgtgtgtgtgttggtctgagcgcgtcgattgcgttgcggtttgggtttgtgtctgggcgcttagctcaaatggtagagcgcccgcttcgcatgcgggaggtaggggggtcgatacccccagtgtccactttttacggcacacaacactttttacgaacaaacactttttaccgcccctcgcgccgctgcttgcttcctagccttcctacccctgctcacccgccacccaagctcacccgccatctgcgagcgtgctggtgcctacgtttacagacgacccaccttttttgtcggcgagtgtggggcaaccacgccgactgccaggcgcaggatcccacaagagtttgggcatgagggagaccggctaaacagctcaccgagagcctggtcagcgccacagaccaaacgcccagctttgtgctgtgtgctctgtgctctgtgctgtgtgtcacctctgtccgggccactggccggtcggacgagtagggttcgagtcagccagctgcttgacatttttgttttcggaggcgggtggctcccggcctggcggttcgaggcttcgggtatgtgaggcagtggaccatggcggagcgcggagaatcgacaaggcgtggatgctggcgcctcacgggtgctaatgtgctggtggagaggacgatcgttgtaatgggtgcggaggcttgcttggcgatgtgtggagggatggcgctgtgaggcggttgtgcgtcgttttgtttggtgtgttttgtggcgagttggcgtgtgcgtgtgtgtgtgtgtgtgttggtctgagcgcgtcgattgcgttgcggtttgggtttgtgtctgggcgcttagctcaaatggtagagcgcccgcttcgcatgcgggaggtagggggatcgatacccccagtgtccactttttacggcacacaacactttttacgaacaaacactttttaccgcccctcgcgccgctgcttgcttcctagccttcctacccctgctcacccgccacccacagctcacccgccatctgcgagcgtgctggtgcctacgtttacagacgacccaccttttttgtcggcgagtgtggggcaaccacgccgactgccaggcgcaggatcccacaagagtttgggcatgagggagaccggctaaacagctcaccgagagcctggtcagcgccacagaccaaacgcccagctgtgtgctgtgtgctctgtgctctgtgctgtgtgtcacctctgtccgggccactggccggtcggacgagtagggttcgagtcagccagctgcttgacatttttgttttcggaggcgggtggctcccggcctggcggttcgaggcttcgggtatgtgaggcagtggaccatggcggagcgcggagaatcgacaaggcgtggatgctggcgcctcacgggtgctaatgtgctggtggagaggacgatcgttgtaatgggtgcggaggcttgcttggcgatgtgtggagggatggcgctgtgaggcggttgtgtgtggttttgtttggtgtgttttgtggcgagttggcgtgtgcgtgtgtgtgtgtgtgttggtctgagcgcgtcgattgcgttgcggtttgggtttgtgtctgggcgcttagctcaaatggtagagcgcccgcttcgcatgcgggaggtagggggatcgatacccccagtgtccactttttacggcacacaacactttttacgaacaaacactttttaccgcccctcgcgccgctgcttgcttcctagccttcctacccctgctcacccgccacccacagctcacccgccatctgcgagcgtgctggtgcctacgtttacagacgacccaccttttttgtcggcgagtgtggggcaaccacgccgactgccaggcgcaggatcccacaagagtttgggcatgagggagaccggctaaacagctcaccgagagcctggtcagcgccacagaccaaacgcccagctgtgtgctgtgtgctctgtgctctgtgctgtgtgtcacctctgtccgggccactggccggtcggacgagtagggttcgagtcagccagctgcttgacatttttgttttcggaggcgggtggctcccggcctggcggttcgaggcttcgggtatgtgaggcagtggaccatggcggagcgcggagaatcgacaaggcgtggatgctggcgcctcacgggtgctaatgtgctggtggagaggacgatcgttgtaatgggtgcggaggcttgcttggcgatgtgtggagggatggcgctgtgaggcgattgtgtgtcgttttgtttggtgtgttttgtggcgagttggcgtgtgcgtgtgtgtgtgtgtgttggtctgagcgcgtcgattgcgttgcggtttgggtttgtgtctgggcgcttagctcaaatggtagagcgcccgcttcgcatgcgggaggtagggggatcgatacccccagtgtccactttttacggcacacaacactttttacgaacaaacactttttaccgcccctcgcgccgctgcttgcttcctagccttcctacccctgctcacccgccacccacagctcacccgccatctgcgagcgtgctggtgcctacgtttacagacgacccaccttttttgtcggcgagtgtggggcaaccacgccgactgccaggcgcaggatcccacaagagtttgggcatgagggagaccggctaaacagctcaccgagagcctggtcagcgccacagaccaaacgcccagctgtgtgctgtgtgctctgtgctctgtgctgtgtgtcacctctgtctgggcgggttcgagtcagccagctgcttgacatttttgttttcggggatcctcagagtcgacnnnnnnnnnnnnnnnnnnnnnnnnnnnnnnnnnnnnnnnnnnnnnnnnnnnnnnnnnnnnnnnnnnnnnnnnnnnnnnnnnnnnnnnnnnnnnnnnnnnnccacccacagctcacccgccatctgcgagcgtgctggtgcctacgtttacagacgacccaccttttttgtcggcgagtgtggggcaaccacgccgactgccaggcgcaggatcccacaagagtttgggcatgagggagaccggctaaacagctcaccgagagcctggtcagcgccacagaccaaacgcccagctttgtgctgtgtgctctgtgctctgtgctgtgtgtcacctctgtccgggccactggccggtcggacgagtagggttcgagtcagccagctgcttgacatttttgttttcggaggcgggtggctcccggcctggcggttcgaggcttcgggtatgtgaggcagtggaccatggcggagcgcggagaatcgacaaggcgtggatgctggcgcctcacgggtgctaatgtgctggtggagaggacgatcgttgtaatgggtgcggaggcttgcttggcgatgtgtggagggatggcgctgtgaggcggttgtgtgtggttttgtttggtgtgttttgtggcgagttggcgtgtgcgtgtgtgtgtgtgtgtgtgtgttggtctgagcgcgtcgattgcgttgcggtttgggtttgtgtctgggcgcttagctcaaatggtagagcgcccgcttcgcatgcggatcgatacccccagtgtccacttttacggcacgcaacactttttacgaacaaacactttttaccgcccctcgcgccgctgcttgcttcctagccttcctacccctgctcacccgccacccacagctcacccgccatctgcgagcgtgctggtgcctacgtttacagacgacccaccttttttgtcggcgagtgtggggcaaccacgccgactgccaggcgcagaatcccacaagagtttgggcatgagggagaccggctaaacagctcaccgagagcctggtcagcgccacagaccaaacgcccagctgtgtgctgtgtgctctgtgctctgtgctgtgtgtcacctctgtccgggccactggccggtcggacgagtagggttcgagtcagccagctgcttgacatttttgttttcggaggcgggtggctcccggcctggcggttcgaggcttcgggtatgtgaggcagtggaccatggcggagcgcggagaatcgacaaggcgtggatgctggcgcctcacgggtgctaatgtgctggtggagaggacgatcgttgtaatgggtgcggaggcttgcttggcgatgtgtggagggatggcgctgtgaggcggttgtgtgtcattttgtttggtgtgttttgtggcgagttggcgtgtgcgtgtgtgtgtgtgtgtgttggtctgagcgcgtcgattgcgttgcggtttgggtttgtgtctgggcgcttagctcaaatggtagagcgcccgcttcgcatgcgggaggtagggggatcgatacccccagtgtccacttttacggcacacaacactttttacgaacaaacactttttaccgcccctcgcgccgctgcttgcttcctagccttcctacccctgctcacccgccacccaagctcacccgccatctgcgagcgtgctggtgcctacgtttacagacgacccaccttttttgtcggcgagtgtggggcaaccacgccgactgccaggcgcaggatcccacaagagtttgggcatgagggagaccggctaaacagctcaccgagagcctggtcagcgccacagaccaaacgcccagctgtgtgctgtgtgctctgtgctctgtgctgtgtgtcacctctgtccgggccactggccggtcggacgagtagggttcgagtcagccagctgcttgacatttttgttttcggaggcgggtggctcccggcctggcggttcgaggcttcgggtatgtgaggcagtggaccatggcggagcgcggagaatcgacaaggcgtggatgctggcgcctcacgggtgctaatgtgctggtggagaggacgatcgttgtaatgggtgcggaggcttgcttggcgatgtgtggagggatgacgctgtgaggcggttgtgtgtggttttgtttggtgtgttttgtggcgagttggcgtgtgcgtgtgtgtgtgtgtgttggtctgagcgcgtcgattgcgttgcggtttgggtttgtgtctgggcgcttagctcaaatggtagagcgcccgcttcgcatgcgggaggtagggggatcgatacccccagtgtccactttttacggcacacaacactttttacgaacaaacactttttaccgcccctcgcgccgctgcttgcttcctagccttcctacccctgctcacccgccacccaagctcacccgccatctgcgagcgtgctggtgcctacgtttacagacgacccaccttttttgtcggcgagtgtggggcaaccacgccgactgccaggcgcaggatcccacaagagtttgggcatgagggagaccggctaaacagctcaccgagagcctggtcagcgccacagaccaaacgcccagctgtgtgctgtgtgctctgtgctctgtgctgtgtgtcacctctgtctgggcgggttcgagtcagccagctgcttgacatttttgttttcggaggcgggtggctcccggcctggcggttcgaggcttcgggtatgtgaggcagtggaccatggcggagcgcggagaatcgacaaggcgtggatgctggcgcctcacgggtgctaatgtgctggtggagaggacgatcgttgtaatgggtgcggaggcttgcttggcgatgtgtggagggatggcgctgtgaggcggttgtgcgtcgttttgtttggtgtgttttgtggcgagttggcgtgtgcgtgtgtgtgtgtgtgtgtgttggtctgagcgcgtcgattgcgttgcggtttgggtttgtgtctgggcgcttagctcaaatggtagagcgcccgcttcgcatgcgggaggtagggggatcgatacccccagtgtccactttttacggcacacaacactttttacgaacaaacactttttaccgcccctcgcgccgctgcttgcttcctagccttcctacccctgctcacccgccacccaagctcacccgccatctgcgagcgtgctggtgcctacgtttacagacgacccaccttttttgtcggcgagtgtggggcaaccacgccgactgccaggcgcaggatcccacaagagtttgggcatgagggagaccggctaaacagctcaccgagagcctggtcagcgccacagaccaaacgcccagctttgtgctgtgtgctctgtgctctgtgctgtgtgtcacctctgtccgggccactggccggtcggacgagtagggttcgagtcagccagctgcttgacatttttgttttcggaggcgggtggctcccggcctggcggttcgaggcttcgggtatgtgaggcagtggaccatggcggagcgcggagaatcgacaaggcgtggatgctggcgcctcacgggtgctaatgtgctggtggagaggacgatcgttgtaatgggtgcggaggcttgcttggcgatgtgtggagggatggcgctgtgaggcggttgtgtgtcgttttgtttggtgtgttttgtggcgagttggcgtgtgcgtgtgtgtgtgtgtgtgttggtctgagcgcgtcgattgcgttgcggtttgggtttgtgtctgggcgcttagctcaaatggtagagcgcccgcttcgcatgcgggaggtagggggatcgatacccccagtgtccactttttacggcacacaacactttttacgaacaaacactttttaccgcccctcgcgccgctgcttgcttcctagccttcctacccctgctcacccgccacccaagctcacccgccatctgcgagcgtgctggtgcctacgtttacagacgacccaccttttttgtcggcgagtgtggggcaaccacgccgactgccaggcgcaggatcccacaagagtttgggcatgagggagaccggctaaacagctcaccgagagcctggtcagcgccacagaccaaacgcccagctgtgtgctgtgtgctctgtgctctgtgctgtgtgtcacctctgtccgggccactggccggtcggacgagtagggttcgagtcagccagctgcttgacatttttgttttcggaggcgggtggctcccggcctggcggttcgaggcttcgggtatgtgaggcagtggaccatggcggagcgcggagaatcgacaaggcgtggatgctggcgcctcacgggtgctaatgtgctggtggagaggacgatcgttgtaatgggtgcggaggcttgcttggcgatgtgtggagggatggcgctgtgaggcggttgtgcgtcgttttgtttggtgtgttttgtggcgagttggcgtgtgcgtgtgtgtgtgttggtctgagcgcgtcgattgcgttgcggtttgggtttgtgtctgggcgcttagctcaaatggtagagcgcccgcttcgcatgcgggaggcagggggatcgatacccccagtgtccactttttacggcacacaacactttttacgaacaaacactttttaccgcccctcgcgccgctgcttgcttcctagccttcctacccctgctcacccgccacccacagctcacccgccatctgcgagcgtgctggtgcctacgtttacagacgacccaccttttttgtcggcgagtgtggggcaaccacgccgactgccaggcgcaggatcccacaagagtttgggcatgagggagaccggctaaacagctcaccgagagcctggtcagcgccacagaccaaacgcccagctgtgtgctgtgtgctctgtgctctgtgctgtgtgtcacctctgtccgggccactggccggtcggacgagtagggttcgagtcagccagctgcttgacatttttgttttcggaggcgggtggctcccggcctggcggttcgaggcttcgggtatgtgaggcagtggaccatggcggagcgcggagaatcgacaaggcgtggatgctggcgcctcacgggtgctaatgtgctggtggagaggacgatcgttgtaatgggtgcggaggcttgcttggcgatgtgtggagggatggcgctgtgaggcggttgtgtgtcgttttgtttggtgtgttttgtggcgagttggcgtgtgcgtgtgtgtgtgtgttggtctgagcgcgtcgattgcgttgcggtttgggtttgtgtctgggcgcttagctcaaatggtagagcgcccgcttcgcatgcgggaggtagggggatcgatacccccagtgtccactttttacggcacacaacactttttacgaacaaacactttttaccgcccctcgcgccgctgcttgcttcctagccttcctacccctgctcacccgccacccacagctcacccgccatctgcgagcgtgctggtgcctacgtttacagacgacccaccttttttgtcggcgagtgtggggcaaccacgccgactgccaggcgcaggatcccacaagagtttgggcatgagggagaccggctaaacagctcaccgagagcctggtcagcgccacagaccaaacgcccagctgtgtgctgtgtgctctgtgctctgtgctgtgtgtcacctctgtctgggcgggttcgagtcagccagctgcttgacatttttgttttcggaggcgggtggctcccggcctggcggttcgaggcttcgggtatgtgaggcagtggaccatggcggagcgcggagaatcgacaaggcgtggatgctggcgcctcacgggtgctaatgtgctggtggagaggacgatcgttgtaatgggtgcggaggcttgcttggcgatgtgtggagggatggcgctgtgaggcggttgtgtgtcgttttgtttggtgtgttttgtggcgagttggcgtgtgcgtgtgtgtgtgtgtgttggtctgagcgcgtcgattgcgttgcggtttgggtttgtgtctgggcgcttagctcaaatggtagagcgcccgcttcgcatgcgggaggtagggggatcgatacccccagtgtccactttttacggcacacaacactttttacgaacaaacactttttaccgcccctcgcgccgctgcttgcttcctagccttcctacccctgctcacccgccacccacagctcacccgccatctgcgagcgtgctggtgcctacgtttacagacgacccaccttttttgtcggcgagtgtggggcaaccacgccgactgccaggcgcaggatcccacaagagtttgggcatgagggagaccggctaaacagctcaccgagagcctggtcagcgccacagaccaaacgcccagctgtgtgctgtgtgctctgtgctgtgtgtcacctctgtccgggccactggccggtcggacgagtagggttcgagtcagccagctgcttgacatttttgtttcggaggcgggtggctcccggcctggcggttcgaggcttcgggtatgtgaggcagtggaccatggcggagcgcggagaatcgacaaggcgtggatgctggcgcctcacgggtgctaatgtgctggtggagaggacgatcgttgtaatgggtgcggaggcttgcttggcgatgtgtggagggatggcgctgtgaggcggttgtgtgtggttttgtttggtgtgttttgtggcgagttggcgtgtgcgtgtgtgtgtgtgtgtgttggtctgagcgcgtcgattgcgttgcggtttgggtttgtgtctgggcgcttagctcaaatggtagagcgcccgcttcgcatgcgggaggtagggggatcgatacccccagtgtccactttttacggcacacaacactttttacgaacaaacactttttaccgcccctcgcgccgctgcttgcttcctagccttcctacccctgctcacccgccacccacagctcacccgccatctgcgagcgtgctggtgcctacgtttacagacgacccaccttttttgtcggcgagtgtggggcaaccacgccgactgccaggcgcaggatcccacaagagtttgggcatgagggagaccggctaaacagctcaccgagagcctggtcagcgccacagaccaaacgcccagctgtgtgctgtgtgctctgtgctctgtgctgtgtgtcacctctgtccgggccactggccggtcggacgagtagggttcgagtcagccagctgcttgacatttttgttttcggaggcgggtggctcccggcctggcggttcgaggcttcgggtatgtgaggcagtggaccatggcggagcgcggagaatcgacaaggcgtggatgctggcgcctcacgggtgctaatgtgctggtggagaggacgatcgttgtaatgggtgcggaggcttgcttggcgatgtgtggagggatggcgctgtgaggcggttgtgcgtcgttttgtttggtgtgttttgtggcgagttggcgtgtgcgtgtgtgtgtgtgtgttggtctgagcgcgtcgattgcgttgcggtttgggtttgtgtctgggcgcttagctcaaatggtagagcgcccgcttcgcatgcgggaggtagggggatcgatacccccagtgtccactttttacggcacacaacactttttacgaacaaacactttttaccgcccctcgcgccgctgcttgcttcctagccttcctacccctgctcacccgccacccaagctcacccgccatctgcgagcgtgctggtgcctacgtttacagacgacccaccttttttgtcggcgagtgtggggcaaccacgccgactgccaggcgcaggatcccacaagagtttgggcatgagggagaccggctaaacagctcaccgagagcctggtcagcgccacagaccaaacgcccagctttgtgctgtgtgctctgtgctctgtgctgtgtgtcacctctgtccgggccactggccggtcggacgagtagggttcgagtcagccagctgcttgacatttttgttttcggaggcgggtggctcccggcctggcggttcgaggcttcgggtatgtgaggcagtggaccatggcggagcgcggagaatcgacaaggcgtggatgctggcgcctcacgggtgctaatgtgctggtggagaggacgatcgttgtaatgggtgcggaggcttgcttggcgatgtgtggagggatggcgctgtgaggcggttgtgtgtcgttttgtttggtgtgttttgtggcgagttggcgtgtgcgtgtgtgtgtgtgtgttggtctgagcgcgtcgattgcgttgcggtttgggtttgtgtctgggcgcttagctcaaatggtagagcgcccgcttcgcatgcgggaggtagggggatcgatacccccagtgtccactttttacggcacacaacactttttacgaacaaacactttttaccgcccctcgcgccgctgcttgcttcctagccttcctacccctgctcacccgccacccaagctcacccgccatctgcgagcgtgctggtgcctacgtttacagacgacccaccttttttgtcggcgagtgtggggcaaccacgccgactgccacaagagtttgggcatgagggagaccggctaaacagctcaccgagagcctggtcagcgccacagaccaaacgcccagctttgtgctgtgtgctctgtgctctgtgctgtgtgtcacctctgtccgggccactggccggtcggacgagtagggttcgagtcagccagctgcttgacatttttgttttcggaggcgggtggctcccggcctggcggttcgaggcttcgggtatgtgaggcagtggaccatggcggagcgcggagaatcgacaaggcgtggatgctggcgcctcacgggtgctaatgtgctggtggagaggacgatcgttgtaatgggtgcggaggcttgcttggcgatgtgtggagggatggcgctgtgaggcggttgtgtgtcgttttgtttggtgtgttttgtggcgagttggcgtgtgcgtgtgtgtgtgtgtgtgttggtctgagcgcgtcgattgcgttgcggtttgggtttgtgtctgggcgcttagctcaaatggtagagcgcccgcttcgcatgcgggaggtagggggatcgatacccccagtgtccactttttacggcacacaacactttttacgaacaaacactttttaccgcccctcgcgccgctgcttgcttcctagccttcctacccctgctcacccgccacccaagctcacccgccatctgcgagcgtgctggtgcctacgtttacagacgacccaccttttttgtcggcgagtgtggggcaaccacgccgactgccaggcgcaggatcccacaagagtttgggcatgagggagaccggctaaacagctcaccgagagcctggtcagcgccacagaccaaacgcccagctttgtgctgtgtgctctgtgctctgtgctgtgtgtcacctctgtccgggccactggccggtcggacgagtagggttcgagtcagccagctgcttgacatttttgttttcggaggcgggtggctcccggcctggcggttcgaggcttcgggtatgtgaggcagtggaccatggcggagcgcggagaatcgacaaggcgtggatgctggcgcctcacgggtgctaatgtgctggtggagaggacgatcgttgtaatgggtgcggaggcttgcttggcgatgtgtggagggatggcgctgtgaggcggttgtgtgtcgttttgtttggtgtgttttgtggcgagttggcgtgtgcgtgtgtgtgtgtgtgtgttggtctgagcgcgtcgattgcgttgcggtttgggtttgtgtctgggcgcttagctcaaatggtagagcgcccgcttcgcatgcgggaggtagggggatcgatacccccagtgtccactttttacggcacacaacactttttacgaacaaacactttttaccgcccctcgcgccgctgcttgcttcctagccttcctacccctgctcacccgccacccacagctcacccgccatctgcgagcgtgctggtgcctacgtttacagacgacccaccttttttgtcggcgagtgtggggcaaccacgccgactgccaggcgcaggatcccacaagagtttgggcatgagggagaccggctaaacagctcaccgagagcctggtcagcgccacagaccaaacgcccagctttgtgctgtgtgctctgtgctgtgtgctgtgtgtcacctctgtccgggccactggccggtcggacgagtagggttcgagtcagccagctgcttgacatttttgttttcggaggcgggtggctcccggcctggcggttcgaggcttcgggtatgtgaggcagtggaccatggcggagcgcggagaatcgacaaggcgtggatgctggcgcctcacgggtgctaatgtgctggtggagaggacgatcgttgtaatgggtgcggaggcttgcttggcgatgtgtggagggatggcgctgtgaggcggttgtgtgtggttttgtttggtgtgttttgtggcgagttggcgtgtgcgtgtgtgtgtgtgtgttggtctgagcgcgtcgattgcgttgcggtttgggtttgtgtctgggcgcttagctcaaatggtagagcgcccgcttcgcatgcgggaggtagggggatcgatacccccagtgtccactttttacggcacacaacactttttacgaacaaacactttttaccgcccctcgcgccgctgcttgcttcctagccttcctacccctgctcacccgccacccacagctcacccgccatctgcgagcgtgctggtgcctacgtttacagacgacccaccttttttgtcggcgagtgtggggcaaccacgccgactgccaggcgcaggatcccacaagagtttgggcatgagggagaccggctaaacagctcaccgagagcctggtcagcgccacagaccaaacgcccagctgtgtgctgtgtgctctgtgctctgtgctgtgtgtcacctctgtccgggccactggccggtcggacgagtagggttcgagtcagccagctgcttgacatttttgttttcggaggcgggtggctcccggcctggcggttcgaggcttcgggtatgtgaggcagtggaccatggcggagcgcggagaatcgacaaggcgtggatgctggcgcctcacgggtgctaatgtgctggtggagaggacgatcgttgtaatgggtgcggaggcttgcttggcgatgtgtggagggatggcgctgtgaggcggttgtgtgtggttttgtttggtgtgttttgtggcgagttggcgtgtgcgtgtgtgtgtgtgtgtgttggtctgagcgcgtcgattgcgttgcggtttgggtttgtgtctgggcgcttagctcaaatggtagagcgcccgcttcgcatgcgggaggtagggggatcgatacccccagtgtccactttttacggcacacaacactttttacgaacaaacactttttaccgcccctcgcgccgctgcttgcttcctagccttcctacccctgctcacccgccacccaagctcacccgccatctgcgagcgtgctggtgcctacgtttacagacgacccaccttttttgtcggcgagtgtggggcaaccacgccgactgccaggcgcaggatcccacaagagtttgggcatgagggagaccggctaaacagctcaccgagagcctggtcagcgccacagaccaaacgcccagctgtgtgctgtgtgctctgtgctctgtgctgtgtgtcacctctgtccgggccactggccggtcggacgagtagggttcgagtcagccagctgcttgacatttttgttttcggaggcgggtggctcccggcctggcggttcgaggcttcgggtatgtgaggcagtggaccatggcggagcgcggagaatcgacaaggcgtggatgctggcgcctcacgggtgctaatgtgctggtggagaggacgatcgttgtaatgggtgcggaggcttgcttggcgatgtgtggagggatggcgctgtgaggcggttgtgtgtggttttgtttggtgtgttttgtggcgagttggcgtgtgcgtgtgtgtgtgtgtgtgttggtctgagcgcgtcgattgcgttgcggtttgggtttgtgtctgggcgcttagctcaaatggtagagcgcccgcttcgcatgcgggaggtagggggatcgatacccccagtgtccactttttacggcacacaacactttttacgaacaaacactttttaccgcccctcgcgccgctgcttgcttcctagccttcctacccctgctcacccgccacccaagctcacccgccatctgcgagcgtgctggtgcctacgtttacagacgacccaccttttttgtcggcgagtgtggggcaaccacgccgactgccaggcgcaggatcccacaagagtttgggcatgagggagaccggctaaacagctcaccgagagcctggtcagcgccacagaccaaacgcccagctttgtgctgtgtgctctgtgctctgtgctgtgtgtcacctctgtccgggccactggccggtcggacgagtagggttcgagtcagccagctgcttgacatttttgttttcggaggcgggtggctcccggcctggcggttcgaggcttcgggtatgtgaggcagtggaccatggcggagcgcggagaatcgacaaggcgtggatgctggcgcctcacgggtgctaatgtgctggtggagaggacgatcgttgtaatgggtgcggaggcttgcttggcgatgtgtggagggatggcgctgtgaggcggttgtgtgtggttttgtttggtgtgttttgtggcgagttggcgtgtgcgtgtgtgtgtgtgtgtgtgttggtctgagcgcgtcgattgcgttgcggtttgggtttgtgtctgggcgcttagctcaaatggtagagcgcccgcttcgcatgcgggaggtagggggatcgatacccccagtgtccactttttacggcacacaacactttttacgaacaaacactttttaccgcccctcgcgccgctgcttgcttcctagccttcctacccctgctcacccgccacccacagctcacccgccatctgcgagcgtgctggtgcctacgtttacagacgacccaccttttttgtcggcgagtgtggggcaaccacgccgactgccaggcgcaggatcccacaagagtttgggcatgagggagaccggctaaacagctcaccgagagcctggtcagcgccacagaccaaacgcccagctttgtgctgtgtgctctgtgctctgtgctgtgtgtcacctctgtccgggccactggccggtcggacgagtagggttcgagtcagccagctgcttgacatttttgttttcggaggcgggtggctcccggcctggcggttcgaggcttcgggtatgtgaggcagtggaccatggcggagcgcggagaatcgacaaggcgtggatgctggcgcctcacgggtgctaatgtgctggtggagaggacgatcgttgtaatgggtgcggaggcttgcttggcgatgtgtggagggatggcgctgtgaggcggttgtgtgtggttttgtttggtgtgttttgtggcgagttggcgtgtgcgtgtgtgtgtgtgtgtgttggtctgagcgcgtcgattgcgttgcggtttgggtttgtgtctgggcgcttagctcaaatggtagagcgcccgcttcgcatgcgggaggtagggggatcgatacccccagtgtccactttttacggcacacaacactttttacgaacaaacactttttaccgcccctcgcgccgctgcttgcttcctagccttcctacccctgctcacccgccacccacagctcacccgccatctgcgagcgtgctggtgcctacgtttacagacgacccaccttttttgtcggcgagtgtggggcaaccacgccgactgccaggcgcaggatcccacaagagtttgggcatgagggagaccggctaaacagctcaccgagagcctggtcagcgccacagaccaaacgcccagctgtgtgctgtgtgctctgtgctctgtgctgtgtgtcacctctgtccgggccactggccggtcggacgagtagggttcgagtcagccagctgcttgacatttttgtttcggaggcgggtggctcccggcctggcggttcgaggcttcgggtatgtgaggcagtggaccatggcggagcgcggagaatcgacaaggcgtggatgctggcgcctcacgggtgctaatgtgctggtggagaggacgatcgttgtaatgggtgcggaggcttgcttggcgatgtgtggagggatggcgctgtgaggcggttgtgtgtggttttgtttggtgtgttttgtggcgagttggcgtgtgcgtgtgtgtgtgtgtgttggtctgagcgcgtcgattgcgttgcggtttgggtttgtgtctgggcgcttagctcaaatggtagagcgcccgcttcgcatgcgggaggtagggggatcgatacccccagtgtccactttttacggcacacaacactttttacgaacaaacactttttaccgcccctcgcgccgctgcttgcttcctagccttcctacccctgctcacccgccacccaagctcacccgccatctgcgagcgtgctggtgcctacgtttacagacgacccaccttttttgtcggcgagtgtggggcaaccacgccgactgccaggcgcaggatcccacaagagtttgggcatgagggagaccggctaaacagctcaccgagagcctggtcagcgccacagaccaaacgcccagctgtgtgctgtgtgctctgtgctgtgtgtcacctctgtccgggccactggccggtcggacgagtagggttcgagtcagccagctgcttgacatttttgtttcggaggcgggtggctcccggcctggcggttcgaggcttcgggtatgtgaggcagtggaccatggcggagcgcggagaatcgacaaggcgtggatgctggcgcctcacgggtgctaatgtgctggtggagaggacgatcgttgtaatgggtgcggaggcttgcttggcgatgtgtggagggatggcgctgtgaggcggttgtgtgtggttttgtttggtgtgttttgtggcgagttggcgtgtgcgtgtgtgtgtgtgtgtgtgttggtctgagcgcgtcgattgcgttgcggtttgggtttgtgtctgggcgcttagctcaaatggtagagcgcccgcttcgcatgcgggaggtagggggatcgatacccccagtgtccactttttacggcacacaacactttttacgaacaaacactttttaccgcccctcgcgccgctgcttgcttcctagccttcctacccctgctcacccgccacccacagctcacccgccatctgcgagcgtgctggtgcctacgtttacagacgacccaccttttttgtcggcgagtgtggggcaaccacgccgactgccaggcgcaggatcccacaagagtttgggcatgagggagaccggctaaacagctcaccgagagcctggtcagcgccacagaccaaacgcccagctgtgtgctgtgtgctctgtgctgtgtgtcacctctgtccgggccactggccggtcggacgagtagggttcgagtcagccagctgcttgacatttttgtttcggaggcgggtggctcccggcctggcggttcgaggcttcgggtatgtgaggcagtggaccatggcggagcgcggagaatcgacaaggcgtggatgctggcgcctcacgggtgctaatgtgctggtggagaggacgatcgttgtaatgggtgcggaggcttgcttggcgatgtgtggagggatggcgctgtgaggcggttgtgtgtggttttgtttggtgtgttttgtggcgagttggcgtgtgtgtgtgtgtgtgtgtgttggtctgagcgcgtcgattgcgttgcggtttgggtttgtgtctgggcgcttagctcaaatggtagagcgcccgcttcgcatgcgggaggtagggggatcgatacccccagtgtccactttttacggcacacaacactttttacgaacaaacactttttaccgcccctcgcgccgctgcttgcttcctagccttcctacccctgctcacccgccacccacagctcacccgccatctgcgagcgtgctggtgcctacgtttacagacgacccaccttttttgtcggcgagtgtggggcaaccacgccgactgccaggcgcaggatcccacaagagtttgggcatgagggagaccggctaaacagctcaccgagagcctggtcagcgccacagaccaaacgcccagctgtgtgctgtgtgctctgtgctgtgtgtcacctctgtccgggccactggccggtcggacgagtagggttcgagtcagccagctgcttgacatttttgtttcggaggcgggtggctcccggcctggcggttcgaggcttcgggtatgtgaggcagtggaccatggcggagcgcggagaatcgacaaggcgtggatgctggcgcctcacgggtgctaatgtgctggtggagaggacgatcgttgtaatgggtgcggaggcttgcttggcgatgtgtggagggatggcgctgtgaggcggttgtgcgtcgttttgtttggtgtgttttgtggcgagttggcgtgtgcgtgtgtgtgtctgtgtgttggtctgagcgcgtcgattgcgttgcggtttgggtttgtgtctgggcgcttagctcaaatggtagagcgcccgcttcgcatgcgggaggtagggggatcgatacccccagtgtccactttttacggcacacaacactttttacgaacaaacactttttaccgcccctcgcgccgctgcttgcttcctagccttcctacccctgctcacccgccacccacagctcacccgccatctgcgagcgtgctggtgcctacgtttacagacgacccaccttttttgtcggcgagtgtggggcaaccacgccgactgccaggcgcaggatcccacaagagtttgggcatgagggagaccggctaaacagctcaccgagagcctggtcagcgccacagaccaaacgcccagctgtgtgctgtgtgctctgtgctctgtgctgtgtgtcacctctgtctgggcgggttcgagtcagccagctgcttgacatttttgttttcggaggcgggtggctcccggcctggcggttcgaggcttcgggtatgtgaggcagtggaccatggcggagcgcggagaatcgacaaggcgtggatgctggcgcctcacgggtgctaatgtgctggtggagaggacgatcgttgtaatgggtgcggaggcttgcttggcgatgtgtggagggatggcgctgtgaggcggttgtgtgtggttttgtttggtgtgttttgtggcgagttggcgtgtgcgtgtgtgtgtgtgtgtgttggtctgagcgcgtcgattgcgttgcggtttgggtttgtgtctgggcgcttagctcaaatggtagagcgcccgcttcgcatgcggatcgatacccccagtgtccacttttacggcacgcaacactttttacgaacaaacactttttaccgcccctcgcgccgctgcttgcttcctagccttcctacccctgctcacccgccagccacagctcacccgccatctgcgagcgtgctggtgcctacgtttacagacgacccaccttttttgtcggcgagtgtggggcaaccacgccgactgccaggcgcaggatcccacaagagtttgggcatgagggagaccggctaaacagctcaccgagagcctggtcagcgccacagaccaaacgcccagctgtgtgctgtgtgctctgtgctctgtgctgtgtgtcacctctgtccgggccactggccggtcggacgagtagggttcgagtcagccagctgcttgacatttttgttttcggaggcgggtggctcccggcctggcggttcgaggcttcgggtatgtgaggcagtggaccatggcggagcgcggagaatcgacaaggcgtggatgctggcgcctcacgggtgctaatgtgctggtggagaggacgatcgttgtaatgggtgcggaggcttgcttggcgatgtgtggagggatggcgctgtgaggcggttgtgtgtggttttgtttggtgtgttttgtggcgagttggcgtgtgcgtgtgtgtgtgtgtgtgtgtgttggtctgagcgcgtcgattgcgttgcggtttgggtttgtgtctgggcgcttagctcaaatggtagagcgcccgcttcgcatgcggatcgatacccccagtgtccacttttacggcacgcaacactttttacgaacaaacactttttaccgcccctcgcgccgctgcttgcttcctagccttcctacccctgctcacccgccacccacagctcacccgccatctgcgagcgtgctggtgcctacgtttacagacgacccaccttttttgtcggcgagtgtggggcaaccacgccgactgccaggcgcagaatcccacaagagtttgggcatgagggagaccggctaaacagctcaccgagagcctggtcagcgccacagaccaaacgcccagctgtgtgctgtgtgctctgtgctctgtgctgtgtgtcacctctgtccgggccactggccggtcggacgagtagggttcgagtcagccagctgcttgacatttttgttttcggaggcgggtggctcccggcctggcggttcgaggcttcgggtatgtgaggcagtggaccatggcggagcgcggagaatcgacaaggcgtggatgctggcgcctcacgggtgctaatgtgctggtggagaggacgatcgttgtaatgggtgcggaggcttgcttggcgatgtgtggagggatggcgctgtgaggcggttgtgtgtggttttgtttggtgtgttttgtggcgagttggcgtgtgcgtgtgtgtgtgtgtgtgtgtgttggtctgagcgcgtcgattgcgttgcggtttgggtttgtgtctgggcgcttagctcaaatggtagagcgcccgcttcgcatgcgggaggtagggggatcgatacccccagtgtccactttttacggcacacaacactttttacgaacaaacactttttaccgcccctcgcgccgctgcttgcttcctagccttcctacccctgctcacccgccacccacagctcacccgccatctgcgagcgtgctggtgcctacgtttacagacgacccaccttttttgtcggcgagtgtggggcaaccacgccgactgccaggcgcaggatcccacaagagtttgggcatgagggagaccggctaaacagctcaccgagagcctggtcagcgccacagaccaaacgcccagctgtgtgctgtgtgctctgtgctctgtgctgtgtgtcacctctgtccgggccactggccggtcggacgagtagggttcgagtcagccagctgcttgacatttttgttttcggaggcgggtggctcccggcctggcggttcgaggcttcgggtatgtgaggcagtggaccatggcggagcgcggagaatcgacaaggcgtggatgctggcgcctcacgggtgctaatgtgctggtggagaggacgatcgttgtaatgggtgcggaggcttgcttggcgatgtgtggagggatggcgctgtgaggcggttgtgtgtggttttgtttggtgtgttttgtggcgagttggcgtgtgcgtgtgtgtgtgtgtgtgttggtctgagcgcgtcgattgcgttgcggtttgggtttgtgtctgggcgcttagctcaaatggtagagcgcccgcttcgcatgcgggaggtagggggatcgatacccccagtgtccactttttacggcacacaacactttttacgaacaaacactttttaccgcccctcgcgccgctgcttgcttcctagccttcctacccctgctcacccgccacccacagctcacccgccatctgcgagcgtgctggtgcctacgtttacagacgacccaccttttttgtcggcgagtgtggggcaaccacgccgactgccaggcgcaggatcccacaagagtttgggcatgagggagaccggctaaacagctcaccgagagcctggtcagcgccacagaccaaacgcccagctgtgtgctgtgtgctctgtgctctgtgctgtgtgtcacctctgtccgggccactggccggtcggacgagtagggttcgagtcagccagctgcttgacatttttgttttcggaggcgggtggctcccggcctggcggttcgaggcttcgggtatgtgaggcagtggaccatggcggagcgcggagaatcgacaaggcgtggatgctggcgcctcacgggtgctaatgtgctggtggagaggacgatcgttgtaatgggtgcggaggcttgcttggcgatgtgtggagggatggcgctgtgaggcggttgtgtgtcgttttgtttggtgtgttttgtggcgagttggcgtgtgcgtgtgtgtgtgtgtgttggtctgagcgcgtcgattgcgttgcggtttgggtttgtgtctgggcgcttagctcaaatggtagagcgcccgcttcgcatgcgggaggtagggggatcgatacccccagtgtccactttttacggcacacaacactttttacgaacaaacactttttaccgcccctcgcgccgctgcttgcttcctagccttcctacccctgctcacccgccacccaagctcacccgccatctgcgagcgtgctggtgcctacgtttacagacgacccaccttttttgtcggcgagtgtggggcaaccacgccgactgccaggcgcaggatcccacaagagtttgggcatgagggagaccggctaaacagctcaccgagagcctggtcagcgccacagaccaaacgcccagctgtgtgctgtgtgctctgtgctctgtgctgtgtgtcacctctgtccgggcgggttcgagtcagccagctgcttgacatttttgttttcggaggcgggtgggctcccggcctggcggttcgaggcttcgggtatgtgaggcagtggaccatggcggagcgcggagaatcgacaaggcgtggatgctggcgcctcacgggtgctaatgtgctggtggagaggacgatcgttgtaatgggtgcggaggcttgcttggcgatgtgtggagggatggcgctgtgaggcggttgtgcgtcgtttcgtttggtgtgttttgtggcgagttggcgtgtgcgtgcgtgtgtgtgtgttgatctgagcgcgtcgattgcgttgcggtttgggtttgtgtctgggcgcttagctcaaatggtagagcacccgcttcgcatgcggatcgatacccccagtgtccacttttacggcacacaacactttttacgaacaaacactttttaccgcccctcgcgccgctgcttgcttcctagccttcctacccctgctcacccgccacccacagctcacccgccatctgcgagcgtgctggtgcctacgtttacagacgacccaccttttttgtcggcgagtgtggggcaaccacgccgactgccaggcgcaggatcccacaagagtttgggcatgagggagaccggctaaacagctcaccgagagcctggtcagcgccacagaccaaacgcccagctgtgtgctgtgtgctctgtgctctgtgctgtgtgtcacctctgtccgggccactggccggtcggacgagtagggttcgagtcagccagctgcttgacatttttgttttcggaggcgggtagctcccggccttgcggttcgaggcttcgggtatgtgaggcagtggaccatggcggagcgcggagaatcgacaaggcgtggatgctggcgcctcacgggtgctaatgtgctggtggagaggacgatcgttgtaatgggtgcggaggcttgcttggcgatgtgtggagggatggcgctgtgaggcggttgtgtgtggttttgtttggtgtgttttgtggcgagttggcgtgtgcgtgtgtgtgtgtgtgtgtgttggtctgagcgcgtcgattgcgttgcggtttgggtttgtgtctgggcgcttagctcaaatggtagagcgcccgcttcgcatgcgggaggtagggggatcgatacccccagtgtccactttttacggcacacaacactttttacgaacaaacactttttaccgcccctcgcgccgctgcttgcttcctagccttcctacccctgctcacccgccacccaagctcacccgccatctgcgagcgtgctggtgcctacgtttacagacgacccaccttttttgtcggcgagtgtggggcaaccacgccgactgccaggcgcaggatcccacaagagtttgggcatgagggagaccggctaaacagctcaccgagagcctggtcagcgccacagaccaaacgcccagctgtgtgctgtgtgctctgtgctctgtgctgtgtgtcacctctgtccgggccactggccggtcggacgagtagggttcgagtcagccagctgcttgacatttttgttttcggaggcgggtggctcccggcctggcggttcgaggcttcgggtatgtgaggcagtggaccatggcggagcgcggagaatcgacaaggcgtggatgctggcgcctcacgggtgctaatgtgctggtggagaggacgatcgttgtaatgggtgcggaggcttgcttggcgatgtgtggagggatggcgctgtgaggcggttgtgcgtcgttttgtttggtgtgttttgtggcgagttggcgtgtgcgtgtgtgtgtgtgtgtgttggtctgagcgcgtcgattgcgttgcggtttgggtttgtgtctgggcgcttagctcaaatggtagagcgcccgcttcgcatgcgggaggtaggggggtcgatacccccagtgtccactttttacggcacacaacactttttacgaacaaacactttttaccgcccctcgcgccgctgcttgcttcctagccttcctacccctgctcacccgccacccacagctcacccgccatctgcgagcgtgctggtgcctacgtttacagacgacccaccttttttgtcggcgagtgtggggcaaccacgccgactgccaggcgcaggatcccacaagagtttgggcatgagggagaccggctaaacagctcaccgagagcctggtcagcgccacagaccaaacgcccagctgtgtgctgtgtgctgtgtgctctgtgctgtgtgtcacctctgtccgggccactggccggtcggacgagtagggttcgagtcagccagctgcttgacatttttgttttcggaggcgggtggctcccggcctggcggttcgaggcttcgggtatgtgaggcagtggaccatggcggagcgcggagaatcgacaaggcgtggatgctggcgcctcacgggtgctaatgtgctggtggagaggacgatcgttgtaatgggtgcggaggcttgcttggcgatgtgtggagggatggcgctgtgaggcggttgtgtgtggttttgtttggtgtgttttgtggcgagttggcgtgtgcgtgtgtgtgtgtgtgtgtgtgttggtctgagcgcgtcgattgcgttgcggtttgggtttgtgtctgggcgcttagctcaaatggtagagcgcccgcttcgcatgcgggaggtagggggatcgatacccccagtgtccactttttacggcacacaacactttttacgaacaaacactttttaccgcccctcgcgccgctgcttgcttcctagccttcctacccctgctcacccgccacccacagctcacccgccatctgcgagcgtgctggtgcctacgtttacagacgacccaccttttttgtcggcgagtgtggggcaaccacgccgactgccaggcgcaggatcccacaagagtttgggcatgagggagaccggctaaacagctcaccgagagcctggtcagcgccacagaccaaacgcccagctgtgtgctgtgtgctctgtgctctgtgctgtgtgtcacctctgtccgggccactggccggtcggacgagtagggttcgagtcagccagctgcttgacatttttgttttcggaggcgggtggctcccggcctggcggttcgaggcttcgggtatgtgaggcagtggaccatggcggagcgcggagaatcgacaaggcgtggatgctggcgcctcacgggtgctaatgtgctggtggagaggacgatcgttgtaatgggtgcggaggcttgcttggcgatgtgtggagggatggcgctgtgaggcggttgtgtgtcattttgtttggtgtgttttgtggcgagttggcgtgtgcgtgtgtgtgtgtgtgttggtctgagcgcgtcgattgcgttgcggtttgggtttgtgtctgggcgcttagctcaaatggtagagcgcccgcttcgcatgcgggaggtagggggatcgatacccccagtgtccactttttacggcacacaacactttttacgaacaaacactttttaccgcccctcgcgccgctgcttgcttcctagccttcctacccctgctcacccgccacccacagctcacccgccatctgcgagcgtgctggtgcctacgtttacagacgacccaccttttttgtcggcgagtgtggggcaaccacgccgactgccaggcgcaggatcccacaagagtttgggcatgagggagaccggctaaacagctcaccgagagcctggtcagcgccacagaccagacgcccagctgtgtgctgtgtgctgtgtgctctgtgctctgtgctgtgtgtcacctctgtccgggccactggccggtcggacgagtagggttcgagtcagccagctgcttgacatttttgttttcggaggcgggtggctcccggcctggcggttcgaggcttcgggtatgtgaggcagtggaccatggcggagcgcggagaatcgacaaggcgtggatgctggcgcctcacgggtgctaatgtgctggtggagaggacgatcgttgtaatgggtgcggaggcttgcttggcgatgtgtggagggatggcgctgtgaggcggttgtgtgtggttttgtttggtgtgttttgtggcgagttggcgtgtgcgtgtgtgtgtgtgtgttggtctgagcgcgtcgattgcgttgcggtttgggtttgtgtctgggcgcttagctcaaatggtagagcacccgcttcgcatgcggatcgatacccccagtgtccacttttacggcacacaacactttttacgaacaaacactttttaccgcccctcgcgccgctgcttgcttcctagccttcctacccctgctcacccgccacccacagctcacccgccatctgcgagcgtgctggtgcctacgtttacagacgacccaccttttttgtcggcgagtgtggggcaaccacgccgactgccaggcgcaggatcccacaagagtttgggcatgagggagaccggctaaacagctcaccgagagcctggtcagcgccacagaccaaacgcccagctgtgtgctctgtgctctgtgctctgtgctgtgtgtcacctctgtccgggccactggccggtcggacgagtagggttcgagtcagccagctgcttgacatttttgttttcggaggcgggtagctcccggcctggcggttcgaggcttcgggtatgtgaggcagtggaccatggcggagcgcggagaatcgacaaggcgtggatgctggcgcctcacgggtgctaatgtgctggtggagaggacgatcgttgtaatgggtgcggaggcttgcttggcgatgtgtggagggatggcgctgtgaggcggttgtgcgtcgttttgtttggtgtgttttgtggcgagttggcgtgtgcgtgtgtgtgttgatctgagcgcgtcgattgcgttgcggcttgggtttgcgtctgggcgcttagctcaaatggtagagcgcccgcttcgcatgcgggaggtagggggatcgatacccccagtgtccacttttacggcacacaacacttttacgaacaaacactttttaccgcccctcgcgccgctgcttgcttcctagccttcctacccctgctcacccgccacccaagctcacccgccatctgcgagcgtgctggtgcctacgtttacagacgacccaccttttttgtcggcgagtgtggggcaaccacgccgactgccaggcgcaggatcccacaagagtttgggcatgagggagaccggctaaacagctcaccgagagcctggtcagcgccacagaccaaacgcccagctgtgtgctgtgtgctctgtgctctgtgctgtgtgtcacctctgtccgggccactggccggtcggacgagtagggttcgagtcagccagctgcttgacatttttgttttcggaggcgggtggctcccggcctggcggttcgaggcttcgggtatgtgaggcagtggaccatggcggagcgcggagaatcgacaaggcgtggatgctggcgcctcacgggtgctaatgtgctggtggagaggacgatcgttgtaatgggtgcggaggcttgcttggcgatgtgtggagggatggcgctgtgaggcggttgtgtgtggttttgtttggtgtgttttgtggcgagttggcgtgtgcgtgtgtgtgtgtgtgttggtctgagcgcgtcgattgcgttgcggtttgggtttgtgtctgggcgcttagctcaaatggtagagcgcccgcttcgcatgcggatcgatacccccagtgtccacttttacggcacgcaacactttttacgaacaaacactttttaccgcccctcgcgccgctgcttgcttcctagccttcctacccctgctcacccgccacccacagctcacccgccatctgcgagcgtgctggtgcctacgtttacagacgacccaccttttttgtcggcgagtgtggggcaaccacgccgactgccaggcgcaggatcccacaagagtttgggcatgagggagaccggctaaacagctcaccgagagcctggtcagcgccacagaccaaacgcccagctgtgtgctgtgtgctctgtgctctgtgctgtgtgtcacctctgtccgggccactggccggtcggacgagtagggttcgagtcagccagctgcttgacatttttgttttcggaggcgggtagctcccggcctggcggttcgaggcttcgggtatgtgaggcagtggaccatggcggagcgcggagaatcgacaaggcgtggatgctggcgcctcacgggtgctaatgtgctggtggagaggacgatcgttgtaatgggtgcggaggcttgcttggcgatgtgtggagggatggcgctgtgaggcggttgtgcgtcgtttcgtttggtgtgttttgtggcgagttggcgtgtgcgtgtgtgtgttgatctgagcgcgtcgattgcgttgcggcttgggtttgcgtctgggcgcttagctcaaatggtagagcgcccgcttcgcatgcggatcgatacccccagtgtccacttttacggcacacaacactttttacgaacaaacactttttaccgcccctcgcgccgctgcttgcttcctagccttcctacccctgctcacccgccacccacagctcacccgccatctgcgagcgtgctggtgcctacgtttacagacgacccaccttttttgtcggcgagtgtggggcaaccacgccgactgccaggcgcaggatcccacaagagttggnnnnnnnnnnnnnnnnnnnnnnnnnnnnnnnnnnnnnnnnnnnnnnnnnnnnnnnnnnnnnnnnnnnnnnnnnnnnnnnnnnnnnnnnnnnnnnnnnnnnnnnnnnnnnnnnnnnnnnnnnnnnnnnnnnnnnnnnnnnnnnnnnnnnnnnnnnnnnnnnnnnnnnnnnnnnnnnnnnnnnnnnnnnnnnnnnnnnnnnnnnnnnnnnnnnnnnnnnnnnnnnnnnnnnnnnnnnnnnnnnnnnnnnnnnnnnnnnnnnnnnnnnnnnnnnnnnnnnnnnnnnnnnnnnnnnnnnnnnnnnnnnnnnnnnnnnnnnnnnnnnnnnnnnnnnnnnnnnnnnnnnnnnnnnnnnnnnnnnnnnnnnnnnnnnnnnnnnnnnnnnnnnnnnnnnnnnnnnnnnnnnnnnnnnnnnnnnnnnnnnnnnnnnnnnnnnnnnnnnnnnnnnnnnnnnnnnnnnnnnnnnnnnnnnnnnnnnnnnnnnnnnnnnnnnnnnnnnnnnnnnnnnnnnnnnnnnnnnnnnnnnnnnnnnnnnnnnnnnnnnnnnnnnnnnnnnnnnnnnnnnnnnnnnnnnnnnnnnnnnnnnnnnnnnnnnnnnnnnnnnnnnnnnnnnnnnnnnnnnnnnnnnnnnnnnnnnnnnnnnnnnnnnnnnnnnnnnnnnnnnnnnnnnnnnnnnnnnnnnnnnnnnnnnnnnnnnnnnnnnnnnnnnnnnnnnnnnnnnnnnnnnnnnnnnnnnnnnnnnnnnnnnnnnnnnnnnnnnnnnnnnnnnnnnnnnnnnnnnnnnnnnnnnnnnnnnnnnnnnnnnnnnnnnnnnnnnnnnnnnnnnnnnnnnnnnnnnnnnnnnnnnnnnnnnnnnnnnnnnnnnnnnnnnnnnnnnnnnnnnnnnnnnnnnnnnnnnnnnnnnnnnnnnnnnnnnnnnnnnnnnnnnnnnnnnnnnnnnnnnnnnnnnnnnnnnnnnnnnnnnnnnnnnnnnnnnnnnnnnnnnnnnnnnnnnnnnnnnnnnnnnnnnnnnnnnnnnnnnnnnnnnnnnnnnnnnnnnnnnnnnnnnnnnnnnnnnnnnnnnnnnnnnnnnnnnnnnnnnnnnnnnnnnnnnnnnnnnnnnnnnnnnnnnnnnnnnnnnnnnnnnnnnnnnnnnnnnnnnnnnnnnnnnnnnnnnnnnnnnnnnnnnnnnnnnnnnnnnnnnnnnnnnnnnnnnnnnnnnnnnnnnnnnnnnnnnnnnnnnnnnnnnnnnnnnnnnnnnnnnnnnnnnnnnnnnnnnnnnnnnnnnnnnnnnnnnnnnnnnnnnnnnnnnnnnnnnnnnnnnnnnnnnnnnnnnnnnnnnnnnnnnnnnnnnnnnnnnnnnnnnnnnnnnnnnnnnnnnnnnnnnnnnnnnnnnnnnnnnnnnnnnnnnnnnnnnnnnnnnnnnnnnnnnnnnnnnnnnnnnnnnnnnnnnnnnnnnnnnnnnnnnnnnnnnnnnnnnnnnnnnnnnnnnnnnnnnnnnnnnnnnnnnnnnnnnnnnnnnnnnnnnnnnnnnnnnnnnnnnnnnnnnnnnnnnnnnnnnnnnnnnnnnnnnnnnnnnnnnnnnnnnnnnnnnnnnnnnnnnnnnnnnnnnnnnnnnnnnnnnnnnnnnnnnnnnnnnnnnnnnnnnnnnnnnnnnnnnnnnnnnnnnnnnnnnnnnnnnnnnnnnnnnnnnnnnnnnnnnnnnnnnnnnnnnnnnnnnnnnnnnnnnnnnnnnnnnnnnnnnnnnnnnnnnnnnnnnnnnnnnnnnnnnnnnnnnnnnnnnnnnnnnnnnnnnnnnnnnnnnnnnnnnnnnnnnnnnnnnnnnnnnnnnnnnnnnnnnnnnnnnnnnnnnnnnnnnnnnnnnnnnnnnnnnnnnnnnnnnnnnnnnnnnnnnnnnnnnnnnnnnnnnnnnnnnnnnnnnnnnnnnnnnnnnnnnnnnnnnnnnnnnnnnnnnnnnnnnnnnnnnnnnnnnnnnnnnnnnnnnnnnnnnnnnnnnnnnnnnnnnnnnnnnnnnnnnnnnnnnnnnnnnnnnnnnnnnnnnnnnnnnnnnnnnnnnnnnnnnnnnnnnnnnnnnnnnnnnnnnnnnnnnnnnnnnnnnnnnnnnnnnnnnnnnnnnnnnnnnnnnnnnnnnnnnnnnnnnnnnnnnnnnnnnnnnnnnnnnnnnnnnnnnnnnnnnnnnnnnnnnnnnnnnnnnnnnnnnnnnnnnnnnnnnnnnnnnnnnnnnnnnnnnnnnnnnnnnnnnnnnnnnnnnnnnnnnnnnnnnnnnnnnnnnnnnnnnnnnnnnnnnnnnnnnnnnnnnnnnnnnnnnnnnnnnnnnnnnnnnnnnnnnnnnnnnnnnnnnnnnnnnnnnnnnnnnnnnnnnnnnnnnnnnnnnnnnnnnnnnnnnnnnnnnnnnnnnnnnnnnnnnnnnnnnnnnnnnnnnnnnnnnnnnnnnnnnnnnnnnnnnnnnnnnnnnnnnnnnnnnnnnnnnnnnnnnnnnnnnnnnnnnnnnnnnnnnnnnnnnnnnnnnnnnnnnnnnnnnnnnnnnnnnnnnnnnnnnnnnnnnnnnnnnnnnnnnnnnnnnnnnnnnnnnnnnnnnnnnnnnnnnnnnnnnnnnnnnnnnnnnnnnnnnnnnnnnnnnnnnnnnnnnnnnnnnnnnnnnnnnnnnnnnnnnnnnnnnnnnnnnnnnnnnnnnnnnnnnnnnnnnnnnnnnnnnnnnnnnnnnnnnnnnnnnnnnnnnnnnnnnnnnnnnnnnnnnnnnnnnnnnnnnnnnnnnnnnnnnnnnnnnnnnnnnnnnnnnnnnnnnnnnnnnnnnnnnnnnnnnnnnnnnnnnnnnnnnnnnnnnnnnnnnnnnnnnnnnnnnnnnnnnnnnnnnnnnnnnnnnnnnnnnnnnnnnnnnnnnnnnnnnnnnnnnnnnnnnnnnnnnnnnnnnnnnnnnnnnnnnnnnnnnnnnnnnnnnnnnnnnnnnnnnnnnnnnnnnnnnnnnnnnnnnnnnnnnnnnnnnnnnnnnnnnnnnnnnnnnnnnnnnnnnnnnnnnnnnnnnnnnnnnnnnnnnnnnnnnnnnnnnnnnnnnnnnnnnnnnnnnnnnnnnnnnnnnnnnnnnnnnnnnnnnnnnnnnnnnnnnnnnnnnnnnnnnnnnnnnnnnnnnnnnnnnnnnnnnnnnnnnnnnnnnnnnnnnnnnnnnnnnnnnnnnnnnnnnnnnnnnnnnnnnnnnnnnnnnnnnnnnnnnnnnnnnnnnnnnnnnnnnnnnnnnnnnnnnnnnnnnnnnnnnnnnnnnnnnnnnnnnnnnnnnnnnnnnnnnnnnnnnnnnnnnnnnnnnnnnnnnnnnnnnnnnnnnnnnnnnnnnnnnnnnnnnnnnnnnnnnnngtgtgttttgtggcgagttggcgtgtgcgtgtgtgtgtgtgtgtgttggtctgagcgcgtcgattgcgttgcggtttgggtttgtgtctgggcgcttagctcaaatggtagagcgcccgcttcgcatgcgggaggtagggggatcgatacccccagtgtccacttttacggcacacaacactttttacgaacaaacactttttaccgcccctcgcgccgctgcttgcttcctagccttcctacccctgctcacccgccacccacagctcacccgccatctgcgagcgtgctggtgcctacgtttacagacgacccaccttttttgtcggcgagtgtggggcaaccacgccgactgccaggcgcaggatcccacaagagtttgggcatgagggagaccggctaaacagctcaccgagagcctggtcagcgccacagaccaaacgcccagctgtgtgctgtgtgctctgtgctctgtgctgtgtgtcacctctgtccgggccactggccggtcggacgagtagggttcgagtcagccagctgcttgacatttttgttttcggaggcgggtggctcccggcctggcggttcgaggcttcgggtatgtgaggcagtggaccatggcggagcgcggagaatcgacaaggcgtggatgctggcgcctcacgggtgctaatgtgctggtggagaggacgatcgttgtaatgggtgcggaggcttgcttggcgatgtgtggagggatggcgctgtgaggcggttgtgcgtcgttttgtttggtgtgttttgtggcgagttggcgtgtgcgtgtgtgtgtgtgtgttggtctgagcgcgtcgattgcgttgcggtttgggtttgtgtctgggcgcttagctcaaatggtagagcgcccgcttcgcatgcgggaggtagggggatcgatacccccagtgtccactttttacggcacacaacactttttacgaacaaacactttttaccgcccctcgcgccgctgcttgcttcctagccttcctacccctgctcacccgccacccacagctcacccgccatctgcgagcgtgctggtgcctacgtttacagacgacccaccttttttgtcggcgagtgtggggcaaccacgccgactgccaggcgcaggatcccacaagagtttgggcatgagggagaccggctaaacagctcaccgagagcctggtcagcgccacagaccaaacgcccagctgtgtgctgtgtgctctgtgctctgtgctgtgtgtcacctctgtccgggccactggccggtcggacgagtagggttcgagtcagccagctgcttgacatttttgttttcggaggcgggtggctcccggcctggcggttcgaggcttcgggtatgtgaggcagtggaccatggcggagcgcggagaatcgacaaggcgtggatgctggcgcctcacgggtgctaatgtgctggtggagaggacgatcgttgtaatgggtgcggaggcttgcttggcgatgtgtggagggatggcgctgtgaggcggttgtgtgtggttttgtttggtgtgttttgtggcgagttggcgtgtgtgtgtgtgtgtgtgtgttggtctgagcgcgtcgattgcgttgcggtttgggtttgtgtctgggcgcttagctcaaatggtagagcgcccgcttcgcatgcgggaggtagggggatcgatacccccagtgtccactttttacggcacacaacactttttacgaacaaacactttttaccgcccctcgcgccgctgcttgcttcctagccttcctacccctgctcacccgccacccacagctcacccgccatctgcgagcgtgctggtgcctacgtttacagacgacccaccttttttgtcggcgagtgtggggcaaccacgccgactgccaggcgcaggatcccacaagagtttgggcatgagggagaccggctaaacagctcaccgagagcctggtcagcgccacagaccaaacgcccagctgtgtgctgtgtgctctgtgctctgtgctgtgtgtcacctctgtccgggccactggccggtcggacgagtagggttcgagtcagccagctgcttgacatttttgtttcggaggcgggtggctcccggcctggcggttcgaggcttcgggtatgtgaggcagtggaccatggcggagcgcggagaatcgacaaggcgtggatgctggcgcctcacgggtgctaatgtgctggtggagaggacgatcgttgtaatgggtgcggaggcttgcttggcgatgtgtggagggatggcgctgtgaggcggttgtgcgtcgttttgtttggtgtgttttgtggcgagttggcgtgtgcgtgtgtgtgtgtgtgttggtctgagcgcgtcgattgcgttgcggtttgggtttgtgtctgggcgcttagctcaaatggtagagcgcccgcttcgcatgcgggaggtagggggatcgatacccccagtgtccactttttacggcacacaacactttttacgaacaaacactttttaccgcccctcgcgccgctgcttgcttcctagccttcctacccctgctcacccgccacccacagctcacccgccatctgcgagcgtgctggtgcctacgtttacagacgacccaccttttttgtcggcgagtgtggggcaaccacgccgactgccaggcgcaggatcccacaagagtttgggcatgagggagaccggctaaacagctcaccgagagcctggtcagcgccacagaccaaacgcccagctgtgtgctgtgtgctctgtgctctgtgctgtgtgtcacctctgtccgggccactggccggtcggacgagtagggttcgagtcagccagctgcttgacatttttgttttcggaggcgggtggctcccggcctggcggttcgaggcttcgggtatgtgaggcagtggaccatggcggagcgcggagaatcgacaaggcgtggatgctggcgcctcacgggtgctaatgtgctggtggagaggacgatcgttgtaatgggtgcggaggcttgcttggcgatgtgtggagggatggcgctgtgaggcggttgtgtgtggttttgtttggtgtgttttgtggcgagttggcgtgtgcgtgtgtgtgtctgtgtgttggtctgagcgcgtcgattgcgttgcggtttgggtttgtgtctgggcgcttagctcaaatggtagagcgcccgcttcgcatgcgggaggcagggggatcgatacccccagtgtccactttttacggcacacaacactttttacgaacaaacactttttaccgcccctcgcgccgctgcttgcttcctagccttcctacccctgctcacccgccacccacagctcacccgccatctgcgagcgtgctggtgcctacgtttacagacgacccaccttttttgtcggcgagtgtggggcaaccacgccgactgccaggcgcaggatcccacaagagtttgggcatgagggagaccggctaaacagctcaccgagagcctggtcagcgccacagaccaaacgcccagctgtgtgctgtgtgctctgtgctctgtgctgtgtgtcacctctgtccgggccactggccggtcggacgagtagggttcgagtcagccagctgcttgacatttttgttttcggaggcgggtggctcccggcctggcggttcgaggcttcgggtatgtgaggcagtggaccatggcggagcgcggagaatcgacaaggcgtggatgctggcgcctcacgggtgctaatgtgctggtggagaggacgatcgttgtaatgggtgcggaggcttgcttggcgatgtgtggagggatgacgctgtgaggcggttgtgtgtggttttgtttggtgtgttttgtggcgagttggcgtgtgcgtgtgtgtgtgtgtgttggtctgagcgcgtcgattgcgttgcggtttgggtttgtgtctgggcgcttagctcaaatggtagagcgcccgcttcgcatgcgggaggtagggggatcgatacccccagtgtccactttttacggcacacaacactttttacgaacaaacactttttaccgcccctcgcgccgctgcttgcttcctagccttcctacccctgctcacccgccacccaagctcacccgccatctgcgagcgtgctggtgcctacgtttacagacgacccaccttttttgtcggcgagtgtggggcaaccacgccgactgccaggcgcaggatcccacaagagtttgggcatgagggagaccggctaaacagctcaccgagagcctggtcagcgccacagaccaaacgcccagctttgtgctgtgtgctctgtgctctgtgctgtgtgtcacctctgtccgggccactggccggtcggacgagtagggttcgagtcagccagctgcttgacatttttgttttcggaggcgggtggctcccggcctggcggttcgaggcttcgggtatgtgaggcagtggaccatggcggagcgcggagaatcgacaaggcgtggatgctggcgcctcacgggtgctaatgtgctggtggagaggacgatcgttgtaatgggtgcggaggcttgcttggcgatgtgtggagggatggcgctgtgaggcggttgtgtgtcgttttgtttggtgtgttttgtggcgagttggcgtgtgcgtgtgtgtgtgtgtgttggtctgagcgcgtcgattgcgttgcggtttgggtttgtgtctgggcgcttagctcaaatggtagagcgcccgcttcgcatgcgggaggtagggggatcgatacccccagtgtccactttttacggcacacaacactttttacgaacaaacactttttaccgcccctcgcgccgctgcttgcttcctagccttcctacccctgctcacccgccacccaagctcacccgccatctgcgagcgtgctggtgcctacgtttacagacgacccaccttttttgtcggcgagtgtggggcaaccacgccgactgccaggcgcaggatcccacaagagtttgggcatgagggagaccggctaaacagctcaccgagagcctggtcagcgccacagaccaaacgcccagctttgtgctgtgtgctctgtgctctgtgctgtgtgtcacctctgtccgggccactggccggtcggacgagtagggttcgagtcagccagctgcttgacatttttgttttcggaggcgggtggctcccggcctggcggttcgaggcttcgggtatgtgaggcagtggaccatggcggagcgcggagaatcgacaaggcgtggatgctggcgcctcacgggtgctaatgtgctggtggagaggacgatcgttgtaatgggtgcggaggcttgcttggcgatgtgtggagggatggcgctgtgaggcggttgtgtgtcgttttgtttggtgtgttttgtggcgagttggcgtgtgcgtgtgtgtgtgtgtgtgttggtctgagcgcgtcgattgcgttgcggtttgggtttgtgtctgggcgcttagctcaaatggtagagcgcccgcttcgcatgcggatcgatacccccagtgtccacttttacggcacgcaacactttttacgaacaaacactttttaccgcccctcgcgccgctgcttgcttcctagccttcctacccctgctcacccgccacccaagctcacccgccatctgcgagcgtgctggtgcctacgtttacagacgacccaccttttttgtcggcgagtgtggggcaaccacgccgactgccaggcgcaggatcccacaagagtttgggcatgagggagaccggctaaacagctcaccgagagcctggtcagcgccacagaccaaacgcccagctttgtgctgtgtgctctgtgctctgtgctgtgtgtcacctctgtccgggccactggccggtcggacgagtagggttcgagtcagccagctgcttgacatttttgttttcggaggcgggtggctcccggcctggcggttcgaggcttcgggtatgtgaggcagtggaccatggcggagcgcggagaatcgacaaggcgtggatgctggcgcctcacgggtgctaatgtgctggtggagaggacgatcgttgtaatgggtgcggaggcttgcttggcgatgtgtggagggatggcgctgtgaggcggttgtgtgtcgttttgtttggtgtgttttgtggcgagttggcgtgtgcgtgtgtgtgtgtgttggtctgagcgcgtcgattgcgttgcggtttgggtttgtgtctgggcgcttagctcaaatggtagagcgcccgcttcgcatgcggatcgatacccccagtgtccactttttacggcacacaacactttttacgaacaaacactttttaccgcccctcgcgccgctgcttgcttcctagccttcctacccctgctcacccgccacccacagctcacccgccatctgcgagcgtgctggtgcctacgtttacagacgacccaccttttttgtcggcgagtgtggggcaaccacgccgactgccaggcgcaggatcccacaagagtttgggcatgagggagaccggctaaacagctcaccgagagcctggtcagcgccacagaccaaacgcccagctgtgtgctgtgtgctctgtgctctgtgctgtgtgtcacctctgtccgggccactggccggtcggacgagtagggttcgagtcagccagctgcttgacatttttgttttcggaggcgggtggctcccggcctggcggttcgaggcttcgggtatgtgaggcagtggaccatggcggagcgcggagaatcgacaaggcgtggatgctggcgcctcacgggtgctaatgtgctggtggagaggacgatcgttgtaatgggtgcggaggcttgcttggcgatgtgtggagggatggcgctgtgaggcggttgtgtgtggttttgtttggtgtgttttgtggcgagttggcgtgtgcgtgtgtgtgtgtgtgtgtgtgttggtctgagcgcgtcgattgcgttgcggtttgggtttgtgtctgggcgcttagctcaaatggtagagcgcccgcttcgcatgcgggaggtagggggatcgatacccccagtgtccactttttacggcacacaacactttttacgaacaaacactttttaccgcccctcgcgccgctgcttgcttcctagccttcctacccctgctcacccgccacccacagctcacccgccatctgcgagcgtgctggtgcctacgtttacagacgacccaccttttttgtcggcgagtgtggggcaaccacgccgactgccaggcgcaggatcccacaagagtttgggcatgagggagaccggctaaacagctcaccgagagcctggtcagcgccacagaccaaacgcccagctgtgtgctgtgtgctctgtgctctgtgctgtgtgtcacctctgtccgggccactggccggtcggacgagtagggttcgagtcagccagctgcttgacatttttgttttcggaggcgggtggctcccggcctggcggttcgaggcttcgggtatgtgaggcagtggaccatggcggagcgcggagaatcgacaaggcgtggatgctggcgcctcacgggtgctaatgtgctggtggagaggacgatcgttgtaatgggtgcggaggcttgcttgacgatgtgtggagggatggcgctgtgaggcggttgtgtgtggttttgtttggtgtgttttgtggcgagttggcgtgtgcgtgtgtgtgtgtgtgtgtgtgttggtctgagcgcgtcgattgcgttgcggtttgggtttgtgtctgggcgcttagctcaaatggtagagcgcccgcttcgcatgcgggaggtagggggatcgatacccccagtgtccacttttacggcacacaacactttttacgaacaaacactttttaccgcccctcgcgccgctgcttgcttcctagccttcctacccctgctcacccgccacccacagctcacccgccatctgcgagcgtgctggtgcctacgtttacagacgacccaccttttttgtcggcgagtgtggggcaaccacgccgactgccaggcgcaggatcccacaagagtttgggcatgagggagaccggctaaacagctcaccgagagcctggtcagcgccacagaccaaacgcccagctgtgtgctgtgtgctctgtgctctgtgctgtgtgtcacctctgtccgggccactggccggtcggacgagtagggttcgagtcagccagctgcttgacatttttgttttcggaggcgggtggctcccggcctggcggttcgaggcttcgggtatgtgaggcagtggaccatggcggagcgcggagaatcgacaaggcgtggatgctggcgcctcacgggtgctaatgtgctggtggagaggacgatcgttgtaatgggtgcggaggcttgcttggcgatgtgtggagggatggcgctgtgaggcggttgtgtgtggttttgtttggtgtgttttgtggcgagttggcgtgtgcgtgtgtgtgtgtgtgttggtctgagcgcgtcgattgcgttgcggtttgggtttgtgtctgggcgcttagctcaaatggtagagcgcccgcttcgcatgcgggaggtagggggatcgatacccccagtgtccactttttacggcacacaacactttttacgaacaaacactttttaccgcccctcgcgccgctgcttgcttcctagccttcctacccctgctcacccgccacccacagctcacccgccatctgcgagcgtgctggtgcctacgtttacagacgacccaccttttttgtcggcgagtgtggggcaaccacgccgactgccaggcgcaggatcccacaagagtttgggcatgagggagaccggctaaacagctcaccgagagcctggtcagcgccacagaccaaacgcccagctgtgtgctgtgtgctctgtgctctgtgctgtgtgtcacctctgtccgggccactggccggtcggacgagtagggttcgagtcagccagctgcttgacatttttgttttcggaggcgggtggctcccggcctggcggttcgaggcttcgggtatgtgaggcagtggaccatggcggagcgcggagaatcgacaaggcgtggatgctggcgcctcacgggtgctaatgtgctggtggagaggacgatcgttgtaatgggtgcggaggcttgcttggcgatgtgtggagggatggcgctgtgaggcggttgtgtgtcgttttgtttggtgtgttttgtggcgagttggcgtgtgcgtgtgtgtgtgtgtgttggtctgagcgcgtcgattgcgttgcggtttgggtttgtgtctgggcgcttagctcaaatggtagagcgcccgcttcgcatgcgggaggtaggggggtcgatacccccagtgtccactttttacggcacacaacactttttacgaacaaacactttttaccgcccctcgcgccgctgcttgcttcctagccttcctacccctgctcacccgccacccaagctcacccgccatctgcgagcgtgctggtgcctacgtttacagacgacccaccttttttgtcggcgagtgtggggcaaccacgccgactgccaggcgcaggatcccacaagagtttgggcatgagggagaccggctaaacagctcaccgagagcctggtcagcgccacagaccaaacgcccagctttgtgctgtgtgctctgtgctctgtgctgtgtgtcacctctgtccgggccactggccggtcggacgagtagggttcgagtcagccagctgcttgacatttttgttttcggaggcgggtggctcccggcctggcggttcgaggcttcgggtatgtgaggcagtggaccatggcggagcgcggagaatcgacaaggcgtggatgctggcgcctcacgggtgctaatgtgctggtggagaggacgatcgttgtaatgggtgcggaggcttgcttggcgatgtgtggagggatggcgctgtgaggcggttgtgtgtcgttttgtttggtgtgttttgtggcgagttggcgtgtgcgtgtgtgtgtgtgtgtgtgttggtctgagcgcgtcgattgcgttgcggtttgggtttgtgtctgggcgcttagctcaaatggtagagcgcccgcttcgcatgcgggaggtagggggatcgatacccccagtgtccactttttacggcacacaacactttttacgaacaaacactttttaccgcccctcgcgccgctgcttgcttcctagccttcctacccctgctcacccgccacccacagctcacccgccatctgcgagcgtgctggtgcctacgtttacagacgacccaccttttttgtcggcgagtgtggggcaaccacgccgactgccaggcgcaggatcccacaagagtttgggcatgagggagaccggctaaacagctcaccgagagcctggtcagcgccacagaccaaacgcccagctttgtgctgtgtgctctgtgctgtgtgctgtgtgtcacctctgtccgggccactggccggtcggacgagtagggttcgagtcagccagctgcttgacatttttgttttcggaggcgggtggctcccggcctggcggttcgaggcttcgggtatgtgaggcagtggaccatggcggagcgcggagaatcgacaaggcgtggatgctggcccctcacgggtggataatgtgctggtggagaggacgatcgttgtaatgggtgcggaggcttgcttggcgatgtgtggagggatggcgctgtgaggcggttgtgtgtggttttgtttggtgtgttttgtggcgagttggcgtgtgtgtgtgtgtgtgtgtgttggtctgagcgcgtcgattgcgttgcggtttgggtttgtgtctgggcgcttagctcaaatggtagagcgcccgcttcgcatgcgggaggtagggggatcgatacccccagtgtccactttttacggcacacaacactttttacgaacaaacactttttaccgcccctcgcgccgctgcttgcttcctagccttcctacccctgctcacccgccacccacagctcacccgccatctgcgagcgtgctggtgcctacgtttacagacgacccaccttttttgtcggcgagtgtggggcaaccacgccgactgccaggcgcaggatcccacaagagtttgggcatgagggagaccggctaaacagctcaccgagagcctggtcagcgccacagaccaaacgcccagctgtgtgctgtgtgctctgtgctctgtgctgtgtgtcacctctgtccgggccactggccggtcggacgagtagggttcgagtcagccagctgcttgacatttttgttttcggaggcgggtggctcccggcctggcggttcgaggcttcgggtatgtgaggcagtggaccatggcggagcgcggagaatcgacaaggcgtggatgctggcgcctcacgggtgctaatgtgctggtggagaggacgatcgttgtaatgggtgcggaggcttgcttggcgatgtgtggagggatggcgctgtgaggcggttgtgtgtggttttgtttggtgtgttttgtggcgagttggcgtgtgcgtgtgtgtgtgtgtgttggtctgagcgcgtcgattgcgttgcggtttgggtttgtgtctgggcgcttagctcaaatggtagagcgcccgcttcgcatgcgggaggtagggggatcgatacccccagtgtccactttttacggcacacaacactttttacgaacaaacactttttaccgcccctcgcgccgctgcttgcttcctagccttcctacccctgctcacccgccacccacagctcacccgccatctgcgagcgtgctggtgcctacgtttacagacgacccaccttttttgtcggcgagtgtggggcaaccacgccgactgccaggcgcaggatcccacaagagtttgggcatgagggagaccggctaaacagctcaccgagagcctggtcagcgccacagaccaaacgcccagctgtgtgctctgtgctctgtgctgtgtgtcacctctgtccgggccactggccggtcggacgagtagggttcgagtcagccagctgcttgacatttttgttttcggaggcgggtggctcccggcctggcggttcgaggcttcgggtatgtgaggcagtggaccatggcggagcgcggagaatcgacaaggcgtggatgctggcgcctcacgggtgctaatgtgctggtggagaggacgatcgttgtaatgggtgcggaggcttgcttggcgatgtgtggagggatggcgctgtgaggcggttgtgtgtggttttgtttggtgtgttttgtggcgagttggcgtgtgcgtgtgtgtgtgtgtgtgttggtctgagcgcgtcgattgcgttgcggtttgggtttgtgtctgggcgcttagctcaaatggtagagcgcccgcttcgcatgcgggaggtagggggatcgatacccccagtgtccactttttacggcacacaacactttttacgaacaaacactttttaccgcccctcgcgccgctgcttgcttcctagccttcctacccctgctcacccgccacccacagctcacccgccatctgcgagcgtgctggtgcctacgtttacagacgacccaccttttttgtcggcgagtgtggggcaaccacgccgactgccaggcgcaggatcccacaagagtttgggcatgagggagaccggctaaacagctcaccgagagcctggtcagcgccacagaccaaacgcccagctgtgtgctgtgtgctctgtgctgtgtgtcacctctgtccgggccactggccggtcggacgagtagggttcgagtcagccagctgcttgacatttttgttttcggaggcgggtggctcccggcctggcggttcgaggcttcgggtatgtgaggcagtggaccatggcggagcgcggagaatcgacaaggcgtggatgctggcgcctcacgggtgctaatgtgctggtggagaggacgatcgttgtaatgggtgcggaggcttgcttggcgatgtgtggagggatggcgctgtgaggcgattgtgtgtggttttgtttggtgtgttttgtggcgagttggcgtgtgcgtgtgtgtgtgtgtgttggtctgagcgcgtcgattgcgttgcggtttgggtttgtgtctgggcgcttagctcaaatggtagagcgcccgcttcgcatgcgggaggtagggggatcgatacccccagtgtccactttttacggcacacaacactttttacgaacaaacactttttaccgcccctcgcgccgctgcttgcttcctagccttcctacccctgctcacccgccacccacagctcacccgccatctgcgagcgtgctggtgcctacgtttacagacgacccaccttttttgtcggcgagtgtggggcaaccacgccgactgccaggcgcaggatcccacaagagtttgggcatgagggagaccggctaaacagctcaccgagagcctggtcagcgccacagaccaaacgcccagctgtgtgctgtgtgctctgtgctgtgtgtcacctctgtccgggccactggccggtcggacgagtagggttcgagtcagccagctgcttgacatttttgttttcggaggcgggtggctcccggcctggcggttcgaggcttcgggtatgtgaggcagtggaccatggcggagcgcggagaatcgacaaggcgtggatgctggcgcctcacgggtgctaatgtgctggtggagaggacgatcgttgtaatgggtgcggaggcttgcttggcgatgtgtggagggatggcgctgtgaggcggttgtgtgtggttttgtttggtgtgttttgtggcgagttggcgtgtgcgtgtgtgtgtgtgtgtgtgtgttggtctgagcgcgtcgattgcgttgcggtttgggtttgtgtctgggcgcttagctcaaatggtagagcgcccgcttcgcatgcgggaggtagggggatcgatacccccagtgtccacttttacggcacacaacactttttacgaacaaacactttttaccgcccctcgcgccgctgcttgcttcctagccttcctacccctgctcacccgccacccacagctcacccgccatctgcgagcgtgctggtgcctacgtttacagacgacccaccttttttgtcggcgagtgtggggcaaccacgccgactgccaggcgcaggatcccacaagagtttgggcatgagggagaccggctaaacagctcaccgagagcctggtcagcgccacagaccaaacgcccagctgtgtgctgtgtgctctgtgctctgtgctgtgtgtcacctctgtccgggccactggccggtcggacgagtagggttcgagtcagccagctgcttgacatttttgttttcggaggcgggtagctcccggccttgcggttcgaggcttcgggtatgtgaggcagtggaccatggcggagcgcggagaatcgacaaggcgtggatgctggcgcctcacgggtgctaatgtgctggtggagaggacgatcgttgtaatgggtgcggaggcttgcttggcgatgtgtggagggatggcgctgtgaggcggttgtgcgtcgtttcgtttggtgtgttttgtggcgagttggcgtgtgcgtgtgtgtgttgatctgagcgcgtcgattgcgttgcggcttgggtttgcgtctgggcgcttagctcaaatggtagagcgcccgcttcgcatgcggatcgatacccccagtgtccacttttacggcacacaacactttttacgaacaaacactttttaccgcccctcgcgccgctgcttgcttcctagccttcctacccctgctcacccgccacccacagctcacccgccatctgcgagcgtgctggtgcctacgtttacagacgacccaccttttttgtcggcgagtgtggggcaaccacgccgactgccaggcgcaggatcccacaagagtttgggcatgagggagaccggctaaacagctcaccgagagcctggtcagcgccacagaccaaacgcccagctgtgtgctgtgtgctctgtgctctgtgctgtgtgtcacctctgtccgggccactggccgttcgggttcgagtcagccagctgcttgacatttttgttttcggaggcgggtagctcccggcctggcggttcgaggcttcgggtatgtgaggcagtggaccatggcggagcgcggagaatcgacaaggcgtggatgctggcgcctcacgggtgctaatgtgctggtggagaggacgatcgttgtaatgggtgcggaggcttgcttggcgatgtgtggagggatggcgctgtgaggcggttgtgtgtggttttgtttggtgtgttttgtggcgagttggcgtgtgcgtgtgtgtgtgtgtgtgttggtctgagcgcgtcgattgcgttgcggtttgggtttgtgtctgggcgcttagctcaaatggtagagcgcccgcttcgcatgcgggaggtagggggatcgatacccccagtgtccactttttacggcacacaacactttttacgaacaaacactttttaccgcccctcgcgccgctgcttgcttcctagccttcctacccctgctcacccgccacccaagctcacccgccatctgcgagcgtgctggtgcctacgtttacagacgacccaccttttttgtcggcgagtgtggggcaaccacgccgactgccaggcgcaggatcccacaagagtttgggcatgagggagaccggctaaacagctcaccgagagcctggtcagcgccacagaccaaacgcccagctttgtgctgtgtgctctgtgctctgtgctgtgtgtcacctctgtccgggccactggccggtcggacgagtagggttcgagtcagccagctgcttgacatttttgttttcggaggcgggtggctcccggcctggcggttcgaggcttcgggtatgtgaggcagtggaccatggcggagcgcggagaatcgacaaggcgtggatgctggcgcctcacgggtgctaatgtgctggtggagaggacgatcgttgtaatgggtgcggaggcttgcttggcgatgtgtggagggatggcgctgtgaggcggttgtgcgtcgttttgtttggtgtgttttgtggcgagttggcgtgtgcgtgtgtgtgttgatctgagcgcgtcgattgcgttgcggcttgggtttgcgtctgggcgcttagctcaaatggtagagcgcccgcttcgcatgcgggaggtagggggatcgatacccccagtgtccacttttacggcacacaacactttttacgaacaaacactttttaccgcccctcgcgccgctgcttgcttcctagccttcctacccctgctcacccgccacccacagctcacccgccatctgcgagcgtgctggtgcctacgtttacagacgacccaccttttttgtcggcgagtgtggggcaaccacgccgactgccaggcgcaggatcccacaagagtttgggcatgagggagaccggctaaacagctcaccgagagcctggtcagcgccacagaccaaacgcccagctgtgtgctctgtgctctgtgctgtgtgtcacctctgtccgggccactggccggtcggacgagtagggttcgagtcagccagctgcttgacatttttgttttcggaggcgggtggctcccggcctggcggttcgaggcttcgggtatgtgaggcagtggaccatggcggagcgcggagaatcgacaaggcgtggatgctggcgcctcacgggtgctaatgtgctggtggagaggacgatcgttgtaatgggtgcggaggcttgcttggcgatgtgtggagggatggcgctgtgaggcggttgtgtgtggttttgtttggtgtgttttgtggcgagttggcgtgtgcgtgtgtgtgtgtgtgttggtctgagcgcgtcgattgcgttgcggcttgggtttgtgtctgggcgcttagctcaaatggtagagcgcccgcttcgcatgcggatcgatacccccagtgtccacttttacggcacacaacactttttacgaacaaacactttttaccgcccctcgcgccgctgcttgcttcctagccttcctacccctgctcacccgccacccacagctcacccgccatctgcgagcgtgctggtgcctacgtttacagacgacccaccttttttgtcggcgagtgtggggcaaccacgccgactgccaggcgcaggatcccacaagagtttgggcatgagggagaccggctaaacagctcaccgagagcctggtcagcgccacagaccaaacgcccagctgtgtgctgtgtgctctgtgctctgtgctgtgtgtcacctctgtccgggccactggccggtcggacgagtagggttcgagtcagccagctgcttgacatttttgtttcggaggcgggtggctcccggcctggcggttcgaggcttcgggtatgtgaggcagtggaccatggcggagcgcggagaatcgacaaggcgtggatgctggcgcctcacgggtgctaatgtgctggtggagaggacgatcgttgtaatgggtgcggaggcttgcttggcgatgtgtggagggatggcgctgtgaggcggttgtgtgtggttttgtttggtgtgttttgtggcgagttggcgtgtgcgtgtgtgtgtgtgtgttggtctgagcgcgtcgattgcgttgcggtttgggtttgtgtctgggcgcttagctcaaatggtagagcgcccgcttcgcatgcgggaggtagggggatcgatacccccagtgtccactttttacggcacacaacactttttacgaacaaacactttttaccgcccctcgcgccgctgcttgcttcctagccttcctacccctgctcacccgccacccacagctcacccgccatctgcgagcgtgctggtgcctacgtttacagacgacccaccttttttgtcggcgagtgtggggcaaccacgccgactgccaggcgcaggatcccacaagagtttgggcatgagggagaccggctaaacagctcaccgagagcctggtcagcgccacagaccaaacgcccagctgtgtgctgtgtgctctgtgctctgtgctgtgtgtcacctctgtccgggccactggccggtcggacgagtagggttcgagtcagccagctgcttgacatttttgttttcggaggcgggtagctcccggcctggcggttcgaggcttcgggtatgtgaggcagtggaccatggcggagcgcggagaatcgacaaggcgtggatgctggcgcctcacgggtgctaatgtgctggtggagaggacgatcgttgtaatgggtgcggaggcttgcttggcgatgtgtggagggatggcgctgtgaggcggttgtgtgtggttttgtttggtgtgttttgtggcgagttggcgtgtgcgtgtgtgtgtgtgtgtgttggtctgagcgcgtcgattgcgttgcggtttgggtttgtgtctgggcgcttagctcaaatggtagagcgcccgcttcgcatgcgggaggtagggggatcgatacccccagtgtccactttttacggcacacaacactttttacgaacaaacactttttaccgcccctcgcgccgctgcttgcttcctagccttcctacccctgctcacccgccacccacagctcacccgccatctgcgagcgtgctggtgcctacgtttacagacgacccaccttttttgtcggcgagtgtggggcaaccacgccgactgccaggcgcaggatcccacaagagtttgggcatgagggagaccggctaaacagctcaccgagagcctggtcagcgccacagaccaaacgcccagctgtgtgctgtgtgctctgtgctgtgtgtcacctctgtccgggccactggccggtcggacgagtagggttcgagtcagccagctgcttgacatttttgtttcggaggcgggtggctcccggcctggcggttcgaggcttcgggtatgtgaggcagtggaccatggcggagcgcggagaatcgacaaggcgtggatgctggcgcctcacgggtgctaatgtgctggtggagaggacgatcgttgtaatgggtgcggaggcttgcttggcgatgtgtggagggatggcgctgtgaggcggttgtgcgtcgttttgtttggtgtgttttgtggcgagttggcgtgtgcgtgtgtgtgtgtgtgttggtctgagcgcgtcgattgcgttgcggtttgggtttgtgtctgggcgcttagctcaaatggtagagcgcccgcttcgcatgcgggaggtagggggatcgatacccccagtatccactttttacggcacacaacactttttacgaacaaacactttttaccgcccctcgcgccgctgcttgcttcctagccttccnnnnnnnnnnnnnnnnnnnnnnnnnnnnnnnnnnnnnnnnnnnnnnnnnnnnnnnnnnnnnnnnnnnnnnnnnnnnnnnnnnnnnnnnnnnnnnnnnnnnnnnnnnnnnnnnnnnnnnnnnnnnnnnnnnnnnnnnnnnnnnnnnnnnnnnnnnnnnnnnnnnnnnnnnnnnnnnnnnnnnnnnnnnnnnnnnnnnnnnnnnnnnnnnnnnnnnnnnnnnnnnnnnnnnnnnnnnnnnnnnnnnnnnnnnnnnnnnnnnnnnnnnnnnnnnnnnnnnnnnnnnnnnnnnnnnnnnnnnnnnnnnnnnnnnnnnnnnnnnnnnnnnnnnnnnnnnnnnnnnnnnnnnnnnnnnnnnnnnnnnnnnnnnnnnnnnnnnnnnnnnnnnnnnnnnnnnnnnnnnnnnnnnnnnnnnnnnnnnnnnnnnnnnnnnnnnnnnnnnnnnnnnnnnnnnnnnnnnnnnnnnnnnnnnnnnnnnnnnnnnnnnnnnnnnnnnnnnnnnnnnnnnnnnnnnnnnnnnnnnnnnnnnnnnnnnnnnnnnnnnnnnnnnnnnnnnnnnnnnnnnnnnnnnnnnnnnnnnnnnnnnnnnnnnnnnnnnnnnnnnnnnnnnnnnnnnnnnnnnnnnnnnnnnnnnnnnnnnnnnnnnnnnnnnnnnnnnnnnnnnnnnnnnnnnnnnnnnnnnnnnnnnnnnnnnnnnnnnnnnnnnnnnnnnnnnnnnnnnnnnnnnnnnnnnnnnnnnnnnnnnnnnnnnnnnnnnnnnnnnnnnnnnnnnnnnnnnnnnnnnnnnnnnnnnnnnnnnnnnnnnnnnnnnnnnnnnnnnnnnnnnnnnnnnnnnnnnnnnnnnnnnnnnnnnnnnnnnnnnnnnnnnnnnnnnnnnnnnnnnnnnnnnnnnnnnnnnnnnnnnnnnnnnnnnnnnnnnnnnnnnnnnnnnnnnnnnnnnnnnnnnnnnnnnnnnnnnnnnnnnnnnnnnnnnnnnnnnnnnnnnnnnnnnnnnnnnnnnnnnnnnnnnnnnnnnnnnnnnnnnnnnnnnnnnnnnnnnnnnnnnnnnnnnnnnnnnnnnnnnnnnnnnnnnnnnnnnnnnnnnnnnnnnnnnnnnnnnnnnnnnnnnnnnnnnnnnnnnnnnnnnnnnnnnnnnnnnnnnnnnnnnnnnnnnnnnnnnnnnnnnnnnnnnnnnnnnnnnnnnnnnnnnnnnnnnnnnnnnnnnnnnnnnnnnnnnnnnnnnnnnnnnnnnnnnnnnnnnnnnnnnnnnnnnnnnnnnnnnnnnnnnnnnnnnnnnnnnnnnnnnnnnnnnnnnnnnnnnnnnnnnnnnnnnnnnnnnnnnnnnnnnnnnnnnnnnnnnnnnnnnnnnnnnnnnnnnnnnnnnacgatcgttgtaatgggtgcggaggcttgcttggcgatgtgtggagggatggcgctgtgaggcggttgtgtgtggttttgtttggtgtgttttgtggcgagttggcgtgtgcgtgtgtgtgtgtgtgtgtgttggtctgagcgcgtcgattgcgttgcggtttgggtttgtgtctgggcgcttagctcaaatggtagagcgcccgcttcgcatgcgggaggtagggggatcgatacccccagtgtccactttttacggcacacaacactttttacgaacaaacactttttaccgcccctcgcgccgctgcttgcttcctagccttcctacccctgctcacccgccacccacagctcacccgccatctgcgagcgtgctggtgcctacgtttacagacgacccaccttttttgtcggcgagtgtggggcaaccacgccgactgccaggcgcaggatcccacaagagtttgggcatgagggagaccggctaaacagctcaccgagagcctggtcagcgccacagaccaaacgcccagctgtgtgctgtgtgctctgtgctgtgtgtcacctctgtccgggccactggccggtcggacgagtagggttcgagtcagccagctgcttgacatttttgtttcggaggcgggtggctcccggcctggcggttcgaggcttcgggtatgtgaggcagtggaccatggcggagcgcggagaatcgacaaggcgtggatgctggcgcctcacgggtgctaatgtgctggtggagaggacgatcgttgtaatgggtgcggaggcttgcttggcgatgtgtggagggatggcgctgtgaggcggttgtgtgtcgttttgtttggtgtgttttgtggcgagttggcgtgtgcgtgtgtgtgtgtgtgttggtctgagcgcgtcgattgcgttgcggtttgggtttgtgtctgggcgcttagctcaaatggtagagcgcccgcttcgcatgcgggaggtagggggatcgatacccccagtgtccactttttacggcacacaacactttttacgaacaaacactttttaccgcccctcgcgccgctgcttgcttcctagccttcctacccctgctcacccgccacccacagctcacccgccatctgcgagcgtgctggtgcctacgtttacagacgacccaccttttttgtcggcgagtgtggggcaaccacgccgactgccaggcgcaggatcccacaagagtttgggcatgagggagaccggctaaacagctcaccgagagcctggtcagcgccacagaccaaacgcccagctgtgtgctgtgtgctctgtgctctgtgctgtgtgtcacctctgtctgggcgggttcgagtcagccagctgcttgacatttttgttttcggaggcgggtggctcccggcctggcggttcgaggcttcgggtatgtgaggcagtggaccatggcggagcgcggagaatcgacaaggcgtggatgctggcgcctcacgggtgctaatgtgctggtggagaggacgatcgttgtaatgggtgcggaggcttgcttggcgatgtgtggagggatggcgctgtgaggcggttgtgtgtggttttgtttggtgtgttttgtggcgagttggcgtgtgcgtgtgtgtgtgtgtgtgttggtctgagcgcgtcgattgcgttgcggtttgggtttgtgtctgggcgcttagctcaaatggtagagcgcccgcttcgcatgcgggaggtagggggatcgatacccccagtgtccactttttacggcacacaacactttttacgaacaaacactttttaccgcccctcgcgccgctgcttgcttcctagccttcctacccctgctcacccgccacccacagctcacccgccatctgcgagcgtgctggtgcctacgtttacagacgacccaccttttttgtcggcgagtgtggggcaaccacgccgactgccaggcgcaggatcccacaagagtttgggcatgagggagaccggctaaacagctcaccgagagcctggtcagcgccacagaccaaacgcccagctttgtgctgtgtgctctgtgctctgtgctgtgtgtcacctctgtccgggccactggccggtcggacgagtagggttcgagtcagccagctgcttgacatttttgttttcggaggcgggtggctcccggcctggcggttcgaggcttcgggtatgtgaggcagtggaccatggcggagcgcggagaatcgacaaggcgtggatgctggcgcctcacgggtgctaatgtgctggtggagaggacgatcgttgtaatgggtgcggaggcttgcttggcgatgtgtggagggatggcgctgtgaggcggttgtgtgtcgttttgtttggtgtgttttgtggcgagttggcgtgtgcgtgtgtgtgtgtgtgtgttggtctgagcgcgtcgattgcgttgcggtttgggtttgtgtctgggcgcttagctcaaatggtagagcgcccgcttcgcatgcgggaggtagggggatcgatacccccagtgtccactttttacggcacacaacactttttacgaacaaacactttttaccgcccctcgcgccgctgcttgcttcctagccttcctacccctgctcacccgccacccaagctcacccgccatctgcgagcgtgctggtgcctacgtttacagacgacccaccttttttgtcggcgagtgtggggcaaccacgccgactgccaggcgcaggatcccacaagagtttgggcatgagggagaccggctaaacagctcaccgagagcctggtcagcgccacagaccaaacgcccagctgtgtgctgtgtgctctgtgctgtgtgtcacctctgtccgggccactggccggtcggacgagtagggttcgagtcagccagctgcttgacatttttgtttcggaggcgggtggctcccggcctggcggttcgaggcttcgggtatgtgaggcagtggaccatggcggagcgcggagaatcgacaaggcgtggatgctggcgcctcacgggtgctaatgtgctggtggagaggacgatcgttgtaatgggtgcggaggcttgcttggcgatgtgtggagggatggcgctgtgaggcggttgtgtgtggttttgtttggtgtgttttgtggcgagttggcgtgtgcgtgtgtgtgtgtgtgttggtctgagcgcgtcgattgcgttgcggtttgggtttgtgtctgggcgcttagctcaaatggtagagcgcccgcttcgcatgcgggaggtagggggatcgatacccccagtgtccactttttacggcacacaacactttttacgaacaaacactttttaccgcccctcgcgccgctgcttgcttcctagccttcctacccctgctcacccgccacccacagctcacccgccatctgcgagcgtgctggtgcctacgtttacagacgacccaccttttttgtcggcgagtgtggggcaaccacgccgactgccaggcgcaggatcccacaagagtttgggcatgagggagaccggctaaacagctcaccgagagcctggtcagcgccacagaccaaacgcccagctgtgtgctgtgtgctctgtgctgtgtgtcacctctgtccgggccactggccggtcggacgagtagggttcgagtcagccagctgcttgacatttttgtttcggaggcgggtggctcccggcctggcggttcgaggcttcgggtatgtgaggcagtggaccatggcggagcgcggagaatcgacaaggcgtggatgctggcgcctcacgggtgctaatgtgctggtggagaggacgatcgttgtaatgggtgcggaggcttgcttggcgatgtgtggagggatggcgctgtgaggcggttgtgtgtcgttttgtttggtgtgttttgtggcgagttggcgtgtgcgtgtgtgtgtgtgtgtgttggtctgagcgcgtcgattgcgttgcggtttgggtttgtgtctgggcgcttagctcaaatggtagagcgcccgcttcgcatgcgggaggtagggggatcgatacccccagtgtccactttttacggcacacaacactttttacgaacaaacactttttaccgcccctcgcgccgctgcttgcttcctagccttcctacccctgctcacccgccacccaagctcacccgccatctgcgagcgtgctggtgcctacgtttacagacgacccaccttttttgtcggcgagtgtggggcaaccacgccgactgccaggcgcaggatcccacaagagtttgggcatgagggagaccggctaaacagctcaccgagagcctggtcagcgccacagaccaaacgcccagctttgtgctgtgtgctctgtgctgtgtgctgtgtgtcacctctgtccgggccactggccggtcggacgagtagggttcgagtcagccagctgcttgacatttttgttttcggaggcgggtggctcccggcctggcggttcgaggcttcgggtatgtgaggcagtggaccatggcggagcgcggagaatcgacaaggcgtggatgctggcgcctcacgggtgctaatgtgctggtggagaggacgatcgttgtaatgggtgcggaggcttgcttggcgatgtgtggagggatggcgctgtgaggcggttgtgtgtggttttgtttggtgtgttttgtggcgagttggcgtgtgcgtgtgtgtgtgtgtgttggtctgagcgcgtcgattgcgttgcggtttgggtttgtgtctgggcgcttagctcaaatggtagagcgcccgcttcgcatgcgggaggtagggggatcgatacccccagtgtccactttttacggcacacaacactttttacgaacaaacactttttaccgcccctcgcgccgctgcttgcttcctagccttcctacccctgctcacccgccacccaagctcacccgccatctgcgagcgtgctggtgcctacgtttacagacgacccaccttttttgtcggcgagtgtggggcaaccacgccgactgccaggcgcaggatcccacaagagtttgggcatgagggagaccggctaaacagctcaccgagagcctggtcagcgccacagaccaaacgcccagctgtgtgctgtgtgctctgtgctgtgtgtcacctctgtccgggccactggccggtcggacgagtagggttcgagtcagccagctgcttgacatttttgtttcggaggcgggtggctcccggcctggcggttcgaggcttcgggtatgtgaggcagtggaccatggcggagcgcggagaatcgacaaggcgtggatgctggcgcctcacgggtgctaatgtgctggtggagaggacgatcgttgtaatgggtgcggaggcttgcttggcgatgtgtggagggatggcgctgtgaggcggttgtgtgtcgttttgtttggtgtgttttgtggcgagttggcgtgtgcgtgtgtgtgtgtgtgtgttggtctgagcgcgtcgattgcgttgcggtttgggtttgtgtctgggcgcttagctcaaatggtagagcgcccgcttcgcatgcgggaggtagggggatcgatacccccagtgtccactttttacggcacacaacactttttacgaacaaacactttttaccgcccctcgcgccgctgcttgcttcctagccttcctacccctgctcacccgccacccaagctcacccgccatctgcgagcgtgctggtgcctacgtttacagacgacccaccttttttgtcggcgagtgtggggcaaccacgccgactgccaggcgcaggatcccacaagagtttgggcatgagggagaccggctaaacagctcaccgagagcctggtcagcgccacagaccaaacgcccagctgtgtgctgtgtgctctgtgctgtgtgtcacctctgtccgggccactggccggtcggacgagtagggttcgagtcagccagctgcttgacatttttgtttcggaggcgggtggctcccggcctggcggttcgaggcttcgggtatgtgaggcagtggaccatggcggagcgcggagaatcgacaaggcgtggatgctggcgcctcacgggtgctaatgtgctggtggagaggacgatcgttgtaatgggtgcggaggcttgcttggcgatgtgtggagggatggcgctgtgaggcggttgtgtgtggttttgtttggtgtgttttgtggcgagttggcgtgtgcgtgtgtgtgtgtgtgtgtgttggtctgagcgcgtcgattgcgttgcggtttgggtttgtgtctgggcgcttagctcaaatggtagagcgcccgcttcgcatgcgggaggtagggggatcgatacccccagtgtccactttttacggcacacaacactttttacgaacaaacactttttaccgcccctcgcgccgctgcttgcttcctagccttcctacccctgctcacccgccacccacagctcacccgccatctgcgagcgtgctggtgcctacgtttacagacgacccaccttttttgtcggcgagtgtggggcaaccacgccgactgccaggcgcaggatcccacaagagtttgggcatgagggagaccggctaaacagctcaccgagagcctggtcagcgccacagaccaaacgcccagctgtgtgctgtgtgctctgtgctgtgtgtcacctctgtccgggccactggccggtcggacgagtagggttcgagtcagccagctgcttgacatttttgtttcggaggcgggtggctcccggcctggcggttcgaggcttcgggtatgtgaggcagtggaccatggcggagcgcggagaatcgacaaggcgtggatgctggcgcctcacgggtgctaatgtgctggtggagaggacgatcgttgtaatgggtgcggaggcttgcttggcgatgtgtggagggatggcgctgtgaggcggttgtgtgtggttttgtttggtgtgttttgtggcgagttggcgtgtgtgtgtgtgtgtgtgtgttggtctgagcgcgtcgattgcgttgcggtttgggtttgtgtctgggcgcttagctcaaatggtagagcgcccgcttcgcatgcgggaggtagggggatcgatacccccagtgtccactttttacggcacacaacactttttacgaacaaacactttttaccgcccctcgcgccgctgcttgcttcctagccttcctacccctgctcacccgccacccacagctcacccgccatctgcgagcgtgctggtgcctacgtttacagacgacccaccttttttgtcggcgagtgtggggcaaccacgccgactgccaggcgcaggatcccacaagagtttgggcatgagggagaccggctaaacagctcaccgagagcctggtcagcgccacagaccaaacgcccagctgtgtgctgtgtgctctgtgctctgtgctgtgtgtcacctctgtccgggccactggccggtcggacgagtagggttcgagtcagccagctgcttgacatttttgttttcggaggcgggtggctcccggcctggcggttcgaggcttcgggtatgtgaggcagtggaccatggcggagcgcggagaatcgacaaggcgtggatgctggcgcctcacgggtgctaatgtgctggtggagaggacgatcgttgtaatgggtgcggaggcttgcttggcgatgtgtggagggatggcgctgtgaggcggttgtgtgtggttttgtttggtgtgttttgtggcgagttggcgtgtgcgtgtgtgtgtctgtgtgttggtctgagcgcgtcgattgcgttgcggtttgggtttgtgtctgggcgcttagctcaaatggtagagcgcccgcttcgcatgcgggaggtagggggatcgatacccccagtgtccactttttacggcacgcaacactttttacgaacaaacactttttaccgcccctcgcgccgctgcttgcttcctagccttcctacccctgctcacccgccacccacagctcacccgccatctgcgagcgtgctggtgcctacgtttacagacgacccaccttttttgtcggcgagtgtggggcaaccacgccgactgccaggcgcaggatcccacaagagtttgggcatgagggagaccggctaaacagctcaccgagagcctggtcagcgccacagaccaaacgcccagctgtgtgctgtgtgctctgtgctctgtgctgtgtgtcacctctgtccgggccactggccggtcggacgagtagggttcgagtcagccagctgcttgacatttttgttttcggaggcgggtggctcccggcctggcggttcgaggcttcgggtatgtgaggcagtggaccatggcggagcgcggagaatcgacaaggcgtggatgctggcgcctcacgggtgctaatgtgctggtggagaggacgatcgttgtaatgggtgcggaggcttgcttggcgatgtgtggagggatggcgctgtgaggcggttgtgtgtggttttgtttggtgtgttttgtggcgagttggcgtgtgcgtgtgtgtgtgtgtgtgttggtctgagcgcgtcgattgcgttgcggtttgggtttgtgtctgggcgcttagctcaaatggtagagcgcccgcttcgcatgcgggaggtagggggatcgatacccccagtgtccactttttacggcacacaacactttttacgaacaaacactttttaccgcccctcgcgccgctgcttgcttcctagccttcctacccctgctcacccgccacccacagctcacccgccatctgcgagcgtgctggtgcctacgtttacagacgacccaccttttttgtcggcgagtgtggggcaaccacgccgactgccaggcgcaggatcccacaagagtttgggcatgagggagaccggctaaacagctcaccgagagcctggtcagcgccacagaccaaacgcccagctgtgtgctgtgtgctctgtgctctgtgctgtgtgtcacctctgtccgggccactggccggtcggacgagtagggttcgagtcagccagctgcttgacatttttgttttcggaggcgggtggctcccggcctggcggttcgaggcttcgggtatgtgaggcagtggaccatggcggagcgcggagaatcgacaaggcgtggatgctggcgcctcacgggtgctaatgtgctggtggagaggacgatcgttgtaatgggtgcggaggcttgcttggcgatgtgtggagggatggcgctgtgaggcggttgtgcgtcgttttgtttggtgtgttttgtggcgagttggcgtgtgcgtgtgtgtgtgtgtgttggtctgagcgcgtcgattgcgttgcggtttgggtttgtgtctgggcgcttagctcaaatggtagagcgcccgcttcgcatgcgggaggtagggggatcgatacccccagtgtccactttttacggcacacaacactttttacgaacaaacactttttaccgcccctcgcgccgctgcttgcttcctagccttcctacccctgctcacccgccacccacagctcacccgccatctgcgagcgtgctggtgcctacgtttacagacgacccaccttttttgtcggcgagtgtggggcaaccacgccgactgccaggcgcaggatcccacaagagtttgggcatgagggagaccggctaaacagctcaccgagagcctggtcagcgccacagaccaaacgcccagctttgtgctgtgtgctctgtgctctgtgctgtgtgtcacctctgtccgggccactggccggtcggacgagtagggttcgagtcagccagctgcttgacatttttgttttcggaggcgggtggctcccggcctggcggttcgaggcttcgggtatgtgaggcagtggaccatggcggagcgcggagaatcgacaaggcgtggatgctggcgcctcacgggtgctaatgtgctggtggagaggacgatcgttgtaatgggtgcggaggcttgcttggcgatgtgtggagggatggcgctgtgaggcggttgtgtgtcgttttgtttggtgtgttttgtggcgagttggcgtgtgcgtgtgtgtgtgtgtgtgttggtctgagcgcgtcgattgcgttgcggtttgggtttgtgtctgggcgcttagctcaaatggtagagcgcccgcttcgcatgcgggaggtagggggatcgatacccccagtgtccactttttacggcacacaacactttttacgaacaaacactttttaccgcccctcgcgccgctgcttgcttcctagccttcctacccctgctcacccgccacccaagctcacccgccatctgcgagcgtgctggtgcctacgtttacagacgacccaccttttttgtcggcgagtgtggggcaaccacgccgactgccaggcgcaggatcccacaagagtttgggcatgagggagaccggctaaacagctcaccgagagcctggtcagcgccacagaccaaacgcccagctgtgtgctgtgtgctctgtgctctgtgctgtgtgtcacctctgtccgggccactggccggtcggacgagtagggttcgagtcagccagctgcttgacatttttgttttcggaggcgggtggctcccggcctggcggttcgaggcttcgggtatgtgaggcagtggaccatggcggagcgcggagaatcgacaaggcgtggatgctggcgcctcacgggtgctaatgtgctggtggagaggacgatcgttgtaatgggtgcggaggcttgcttggcgatgtgtggagggatggcgctgtgaggcggttgtgtgtggttttgtttggtgtgttttgtggcgagttggcgtgtgcgtgtgtgtgtgtgtgtgtgttggtctgagcgcgtcgattgcgttgcggtttgggtttgtgtctgggcgcttagctcaaatggtagagcgcccgcttcgcatgcgggaggtagggggatcgatacccccagtgtccactttttacggcacacaacactttttacgaacaaacactttttaccgcccctcgcgccgctgcttgcttcctagccttcctacccctgctcacccgccacccacagctcacccgccatctgcgagcgtgctggtgcctacgtttacagacgacccaccttttttgtcggcgagtgtggggcaaccacgccgactgccaggcgcaggatcccacaagagtttgggcatgagggagaccggctaaacagctcaccgagagcctggtcagcgccacagaccaaacgcccagctgtgtgctgtgtgctctgtgctctgtgctgtgtgtcacctctgtccgggccactggccggtcggacgagtagggttcgagtcagccagctgcttgacatttttgttttcggaggcgggtggctcccggcctggcggttcgaggcttcgggtatgtgaggcagtggaccatggcggagcgcggagaatcgacaaggcgtggatgctggcgcctcacgggtgctaatgtgctggtggagaggacgatcgttgtaatgggtgcggaggcttgcttggcgatgtgtggagggatggcgctgtgaggcggttgtgcgtcgttttgtttggtgtgttttgtggcgagttggcgtgtgcgtgtgtgtgtgtgtgtgttggtctgagcgcgtcgattgcgttgcggtttgggtttgtgtctgggcgcttagctcaaatggtagagcgcccgcttcgcatgcgggaggtaggggggtcgatacccccagtgtccactttttacggcacacaacactttttacgaacaaacactttttaccgcccctcgcgccgctgcttgcttcctagccttcctacccctgctcacccgccacccaagctcacccgccatctgcgagcgtgctggtgcctacgtttacagacgacccaccttttttgtcggcgagtgtggggcaaccacgccgactgccaggcgcaggatcccacaagagtttgggcatgagggagaccggctaaacagctcaccgagagcctggtcagcgccacagaccaaacgcccagctgtgtgctgtgtgctctgtgctctgtgctgtgtgtcacctctgtccgggccactggccggtcggacgagtagggttcgagtcagccagctgcttgacatttttgttttcggaggcgggtagctcccggcctggcggttcgaggcttcgggtatgtgaggcagtggaccatggcggagcgcggagaatcgacaaggcgtggatgctggcgcctcacgggtgctaatgtgctggtggagaggacgatcgttgtaatgggtgcggaggcttgcttggcgatgtgtggagggatggcgctgtgaggcggttgtgtgtggttttgtttggtgtgttttgtggcgagttggcgtgtgtgtgtgtgtgtgtgtgttggtctgagcgcgtcgattgcgttgcggtttgggtttgtgtctgggcgcttagctcaaatggtagagcgcccgcttcgcatgcgggaggtagggggatcgatacccccagtgtccactttttacggcacacaacactttttacgaacaaacactttttaccgcccctcgcgccgctgcttgcttcctagccttcctacccctgctcacccgccacccaagctcacccgccatctgcgagcgtgctggtgcctacgtttacagacgacccaccttttttgtcggcgagtgtggggcaaccacgccgactgccaggcgcaggatcccacaagagtttgggcatgagggagaccggctaaacagctcaccgagagcctggtcagcgccacagaccaaacgcccagctgtgtgctgtgtgctctgtgctctgtgctgtgtgtcacctctgtccgggccactggccggtcggacgagtagggttcgagtcagccagctgcttgacatttttgttttcggaggcgggtggctcccggcctggcggttcgaggcttcgggtatgtgaggcagtggaccatggcggagcgcggagaatcgacaaggcgtggatgctggcgcctcacgggtgctaatgtgctggtggagaggacgatcgttgtaatgggtgcggaggcttgcttggcgatgtgtggagggatggcgctgtgaggcggttgtgtgtggttttgtttggtgtgttttgtggcgagttggcgtgtgcgtgtgtgtgtgtgtgtgtgttggtctgagcgcgtcgattgcgttgcggtttgggtttgtgtctgggcgcttagctcaaatggtagagcgcccgcttcgcatgcgggaggtagggggatcgatacccccagtgtccactttttacggcacacaacactttttacgaacaaacactttttaccgcccctcgcgccgctgcttgcttcctagccttcctacccctgctcacccgccacccaagctcacccgccatctgcgagcgtgctggtgcctacgtttacagacgacccaccttttttgtcggcgagtgtggggcaaccacgccgactgccaggcgcaggatcccacaagagtttgggcatgagggagaccggctaaacagctcaccgagagcctggtcagcgccacagaccaaacgcccagctgtgtgctgtgtgctctgtgctgtgtgtcacctctgtccgggccactggccggtcggacgagtagggttcgagtcagccagctgcttgacatttttgtttcggaggcgggtggctcccggcctggcggttcgaggcttcgggtatgtgaggcagtggaccatggcggagcgcggagaatcgacaaggcgtggatgctggcgcctcacgggtgctaatgtgctggtggagaggacgatcgttgtaatgggtgcggaggcttgcttggcgatgtgtggagggatggcgctgtgaggcggttgtgcgtcgttttgtttggtgtgttttgtggcgagttggcgtgtgcgtgtgtgtgtgtgtgttggtctgagcgcgtcgattgcgttgcggtttgggtttgtgtctgggcgcttagctcaaatggtagagcgcccgcttcgcatgcgggaggtagggggatcgatacccccagtgtccactttttacggcacacaacactttttacgaacaaacactttttaccgcccctcgcgccgctgcttgcttcctagccttcctacccctgctcacccgccacccacagctcacccgccatctgcgagcgtgctggtgcctacgtttacagacgacccaccttttttgtcggcgagtgtggggcaaccacgccgactgccaggcgcaggatcccacaagagtttgggcatgagggagaccggctaaacagctcaccgagagcctggtcagcgccacagaccaaacgcccagctgtgtgctgtgtgctctgtgctctgtgctgtgtgtcacctctgtccgggccactggccggtcggacgagtagggttcgagtcagccagctgcttgacatttttgtttcggaggcgggtggctcccggcctggcggttcgaggcttcgggtatgtgaggcagtggaccatggcggagcgcggagaatcgacaaggcgtggatgctggcgcctcacgggtgctaatgtgctggtggagaggacgatcgttgtaatgggtgcggaggcttgcttggcgatgtgtggagggatggcgctgtgaggcggttgtgcgtcgttttgtttggtgtgttttgtggcgagttggcgtgtgcgtgtgtgtgtgtgtgttggtctgagcgcgtcgattgcgttgcggtttgggtttgtgtctgggcgcttagctcaaatggtagagcgcccgcttcgcatgcgggaggtagggggatcgatacccccagtgtccactttttacggcacacaacactttttacgaacaaacactttttaccgcccctcgcgccgctgcttgcttcctagccttcctacccctgctcacccgccacccacagctcacccgccatctgcgagcgtgctggtgcctacgtttacagacgacccaccttttttgtcggcgagtgtggggcaaccacgccgactgccaggcgcaggatcccacaagagtttgggcatgagggagaccggctaaacagctcaccgagagcctggtcagcgccacagaccaaacgcccagctgtgtgctgtgtgctgtgtgctctgtgctgtgtgtcacctctgtccgggccactggccggtcggacgagtagggttcgagtcagccagctgcttgacatttttgttttcggaggcgggtggctcccggcctggcggttcgaggcttcgggtatgtgaggcagtggaccatggcggagcgcggagaatcgacaaggcgtggatgctggcgcctcacgggtgctaatgtgctggtggagaggacgatcgttgtaatgggtgcggaggcttgcttggcgatgtgtggagggatggcgctgtgaggcggttgtgtgtggttttgtttggtgtgttttgtggcgagttggcgtgtgcgtgtgtgtgtgtgtgtgttggtctgagcgcgtcgattgcgttgcggtttgggtttgtgtctgggcgcttagctcaaatggtagagcgcccgcttcgcatgcgggaggtagggggatcgatacccccagtgtccactttttacggcacacaacactttttacgaacaaacactttttaccgcccctcgcgccgctgcttgcttcctagccttcctacccctgctcacccgccacccacagctcacccgccatctgcgagcgtgctggtgcctacgtttacagacgacccaccttttttgtcggcgagtgtggggcaaccacgccgactgccaggcgcaggatcccacaagagtttgggcatgagggagaccggctaaacagctcaccgagagcctggtcagcgccacagaccaaacgcccagctgtgtgctgtgtgctctgtgctctgtgctgtgtgtcacctctgtccgggccactggccggtcggacgagtagggttcgagtcagccagctgcttgacatttttgttttcggaggcgggtggctcccggcctggcggttcgaggcttcgggtatgtgaggcagtggaccatggcggagcgcggagaatcgacaaggcgtggatgctggcgcctcacgggtgctaatgtgctggtggagaggacgatcgttgtaatgggtgcggaggcttgcttggcgatgtgtggagggatggcgctgtgaggcggttgtgtgtggttttgtttggtgtgttttgtggcgagttggcgtgtgcgtgtgtgtgtgtgtgtgtgtgttggtctgagcgcgtcgattgcgttgcggtttgggtttgtgtctgggcgcttagctcaaatggtagagcgcccgcttcgcatgcgggaggcagggggatcgatacccccagtgtccacttttacggcacgcaacactttttacgaacaaacactttttaccgcccctcgcgccgctgcttgcttcctagccttcctacccctgctcacccgccacccacagctcacccgccatctgcgagcgtgctggtgcctacgtttacagacgacccaccttttttgtcggcgagtgtggggcaaccacgccgactgccaggcgcaggatcccacaagagtttgggcatgagggagaccggctaaacagctcaccgagagcctggtcagcgccacagaccaaacgcccagctgtgtgctgtgtgctctgtgctctgtgctgtgtgtcacctctgtccgggccactggccggtcggacgagtagggttcgagtcagccagctgcttgacatttttgttttcggaggcgggtggctcccggcctggcggttcgaggcttcgggtatgtgaggcagtggaccatggcggagcgcggagaatcgacaaggcgtggatgctggcgcctcacgggtgctaatgtgctggtggagaggacgatcgttgtaatgggtgcggaggcttgcttggcgatgtgtggagggatggcgctgtgaggcggttgtgtgtggttttgtttggtgtgttttgtggcgagttggcgtgtgcgtgtgtgtgtgtgtgttggtctgagcgcgtcgattgcgttgcggtttgggtttgtgtctgggcgcttagctcaaatggtagagcacccgcttcgcatgcggatcgatacccccagtgtccacttttacggcacacaacactttttacgaacaaccactttttaccgcccctcgcgccgctgcttgcttcctagccttcctacccctgctcacccgccacccacagctcacccgccatctgcgagcgtgctggtgcctacgtttacagacgacccaccttttttgtcggcgagtgtggggcaaccacgccgactgccaggcgcaggatcccacaagagtttgggcatgagggagaccggctaaacagctcaccgagagcctggtcagcgccacagaccaaacgcccagctttgtgctgtgtgctctgtgctctgtgctgtgtgtcacctctgtccgggccactggccggtcggacgagtagggttcgagtcagccagctgcttgacatttttgttttcggaggcgggtggctcccggcctggcggttcgaggcttcgggtatgtgaggcagtggaccatggcggagcgcggagaatcgacaaggcgtggatgctggcgcctcacgggtgctaatgtgctggtggagaggacgatcgttgtaatgggtgcggaggcttgcttggcgatgtgtggagggatggcgctgtgaggcggttgtgtgtcgttttgtttggtgtgttttgtggcgagttggcgtgtgcgtgtgtgtgtgtgttggtctgagcgcgtcgattgcgttgcggtttgggtttgtgtctgggcgcttagctcaaatggtagagcgcccgcttcgcatgcgggaggtagggggatcgatacccccagtgtccactttttacggcacacaacactttttacgaacaaacactttttaccgcccctcgcgccgctgcttgcttcctagccttcctacccctgctcacccgccacccacagctcacccgccatctgcgagcgtgctggtgcctacgtttacagacgacccaccttttttgtcggcgagtgtggggcaaccacgccgactgccaggcgcaggatcccacaagagtttgggcatgagggagaccggctaaacagctcaccgagagcctggtcagcgccacagaccaaacgcccagctttgtgctgtgtgctctgtgctctgtgctgtgtgtcacctctgtccgggccactggccggtcggacgagtagggttcgagtcagccagctgcttgacatttttgttttcggaggcgggtggctcccggcctggcggttcgaggcttcgggtatgtgaggcagtggaccatggcggagcgcggagaatcgacaaggcgtggatgctggcgcctcacgggtgctaatgtgctggtggagaggacgatcgttgtaatgggtgcggaggcttgcttggcgatgtgtggagggatggcgctgtgaggcggttgtgtgtggttttgtttggtgtgttttgtggcgagttggcgtgtgcgtgtgtgtgtgtgtgttggtctgagcgcgtcgattgcgttgcggtttgggtttgtgtctgggcgcttagctcaaatggtagagcgcccgcttcgcatgcgggaggtagggggatcgatacccccagtctccactttttacggcacacaacactttttacgaacaaacactttttaccgcccctcgcgccgctgcttgcttcctagccttcctacccctgctcacccgccacccaagctcacccgccatctgcgagcgtgctggtgcctacgtttacagacgacccaccttttttgtcggcgagtgtggggcaaccacgccgactgccaggcgcaggatcccacaagagtttgggcatgagggagaccggctaaacagctcaccgagagcctggtcagcgccacagaccaaacgcccagctttgtgctgtgtgctctgtgctctgtgctgtgtgtcacctctgtccgggccactggccggtcggacgagtagggttcgagtcagccagctgcttgacatttttgttttcggaggcgggtggctcccggcctggcggttcgaggcttcgggtatgtgaggcagtggaccatggcggagcgcggagaatcgacaaggcgtggatgctggcgcctcacgggtgctaatgtgctggtggagaggacgatcgttgtaatgggtgcggaggcttgcttggcgatgtgtggagggatggcgctgtgaggcggttgtgcgtcgttttgtttggtgtgttttgtggcgagttggcgtgtgcgtgtgtgtgtgtgtgttggtctgagcgcgccgannnnnnnnnnnnnnnnnnnnnnnnnnnnnnnnnnnnnnnnnnnnnnnnnnnnnnnnnnnnnnnnnnnnnnnnnnnnnnnnnnnnnnnnnnnnnnnnnnnnnnnnnnnnnnnnnnnnnnnnnnnnnnnnnnnnnnnnnnnnnnnnnnnnnnnnnnnnnnnnnnnnnnnnnnnnnnnnnnnnnnnnnnnnnnnnnnnnnnnnnnnnnnnnnnnnnnnnnnnnnnnnnnnnnnnnnnnnnnnnnnnnnnnnnnnnnnnnnnnnnnnnnnnnnnnnnnnnnnnnnnnnnnnnnnnnnnnnnnnnnnnnnnnnnnnnnnnnnnnnnnnnnnnnnnnnnnnnnnnnnnnnnnnnnnnnnnnnnnnnnnnnnnnnnnnnnnnnnnnnnnnnnnnnnnnnnnnnnnnnnnnnnnnnnnnnnnnnnnnnnnnnnnnnnnnnnnnnnnnnnnnnnnnnnnnnnnnnnnnnnnnnnnnnnnnnnnnnnnnnnnnnnnnnnnnnnnnnnnnnnnnnnnnnnnnnnnnnnnnnnnnnnnnnnnnnnnnnnnnnnnnnnnnnnnnnnnnnnnnnnnnnnnnnnnnnnnnnnnnnnnnnnnnnnnnnnnnnnnnnnnnnnnnnnnnnnnnnnnnnnnnnnnnnnnnnnnnnnnnnnnnnnnnnnnnnnnnnnnnnnnnnnnnnnnnnnnnnnnnnnnnnnnnnnnnnnnnnnnnnnnnnnnnnnnnnnnnnnnnnnnnnnnnnnnnnnnnnnnnnnnnnnnnnnnnnnnnnnnnnnnnnnnnnnnnnnnnnnnnnnnnnnnnnnnnnnnnnnnnnnnnnnnnnnnnnnnnnnnnnnnnnnnnnnnnnnnnnnnnnnnnnnnnnnnnnnnnnnnnnnnnnnnnnnnnnnnnnnnnnnnnnnnnnnnnnnnnnnnnnnnnnnnnnnnnnnnnnnnnnnnnnnnnnnnnnnnnnnnnnnnnnnnnnnnnnnnnnnnnnnnnnnnnnnnnnnnnnnnnnnnnnnnnnnnnnnnnnnnnnnnnnnnnnnnnnnnnnnnnnnnnnnnnnnnnnnnnnnnnnnnnnnnnnnnnnnnnnnnnnnnnnnnnnnnnnnnnnnnnnnnnnnnnnnnnnnnnnnnnnnnnnnnnnnnnnnnnnnnnnnnnnnnnnnnnnnnnnnnnnnnnnnnnnnnnnnnnnnnnnnnnnnnnnnnnnnnnnnnnnnnnnnnnnnnnnnnnnnnnnnnnnnnnnnnnnnnnnnnnnnnnnnnnnnnnnnnnnnnnnnnnnnnnnnnnnnnnnnnnnnnnnnnnnnnnnnnnnnnnnnnnnnnnnnnnnnnnnnnnnnnnnnnnnnnnnnnnnnnnnnnnnnnnnnnnnnnnnnnnnnnnnnnnnnnnnnnnnnnnnnnnnnnnnnnnnnnnnnnnnnnnnnnnnnnnnnnnnnnnnnnnnnnnnnnnnnnnnnnnnnnnnnnnnnnnnnnnnnnnnnnnnnnnnnnnnnnnnnnnnnnnnnnnnnnnnnnnnnnnnnnnnnnnnnnnnnnnnnnnnnnnnnnnnnnnnnnnnnnnnnnnnnnnnnnnnnnnnnnnnnnnnnnnnnnnnnnnnnnnnnnnnnnnnnnnnnnnnnnnnnnnnnnnnnnnnnnnnnnnnnnnnnnnnnnnnnnnnnnnnnnnnnnnnnnnnnnnnnnnnnnnnnnnnnnnnnnnnnnnnnnnnnnnnnnnnnnnnnnnnnnnnnnnnnnnnnnnnnnnnnnnnnnnnnnnnnnnnnnnnnnnnnnnnnnnnnnnnnnnnnnnnnnnnnnnnnnnnnnnnnnnnnnnnnnnnnnnnnnnnnnnnnnnnnnnnnnnnnnnnnnnnnnnnnnnnnnnnnnnnnnnnnnnnnnnnnnnnnnnnnnnnnnnnnnnnnnnnnnnnnnnnnnnnnnnnnnnnnnnnnnnnnnnnnnnnnnnnnnnnnnnnnnnnnnnnnnnnnnnnnnnnnnnnnnnnnnnnnnnnnnnnnnnnnnnnnnnnnnnnnnnnnnnnnnnnnnnnnnnnnnnnnnnnnnnnnnnnnnnnnnnnnnnnnnnnnnnnnnnnnnnnnnnnnnnnnnnnnnnnnnnnnnnnnnnnnnnnnnnnnnnnnnnnnnnnnnnnnnnnnnnnnnnnnnnnnnnnnnnnnnnnnnnnnnnnnnnnnnnnnnnnnnnnnnnnnnnnnnnnnnnnnnnnnnnnnnnnnnnnnnnnnnnnnnnnnnnnnnnnnnnnnnnnnnnnnnnnnnnnnnnnnnnnnnnnnnnnnnnnnnnnnnnnnnnnnnnnnnnnnnnnnnnnnnnnnnnnnnnnnnnnnnnnnnnnnnnnnnnnnnnnnnnnnnnnnnnnnnnnnnnnnnnnnnnnnnnnnnnnnnnnnnnnnnnnnnnnnnnnnnnnnnnnnnnnnnnnnnnnnnnnnnnnnnnnnnnnnnnnnnnnnnnnnnnnnnnnnnnnnnnnnnnnnnnnnnnnnnnnnnnnnnnnnnnnnnnnnnnnnnnnnnnnnnnnnnnnnnnnnnnnnnnnnnnnnnnnnnnnnnnnnnnnnnnnnnnnnnnnnnnnnnnnnnnnnnnnnnnnnnnnnnnnnnnnnnnnnnnnnnnnnnnnnnnnnnnnnnnnnnnnnnnnnnnnnnnnnnnnnnnnnnnnnnnnnnnnnnnnnnnnnnnnnnnnnnnnnnnnnnnnnnnnnnnnnnnnnnnnnnnnnnnnnnnnnnnnnnnnnnnnnnnnnnnnnnnnnnnnnnnnnnnnnnnnnnnnnnnnnnnnnnnnnnnnnnnnnnnnnnnnnnnnnnnnnnnnnnnnnnnnnnnnnnnnnnnnnnnnnnnnnnnnnnnnnnnnnnnnnnnnnnnnnnnnnnnnnnnnnnnnnnnnnnnnnnnnnnnnnnnnnnnnnnnnnnnnnnnnnnnnnnnnnnnnnnnnnnnnnnnnnnnnnnnnnnnnnnnnnnnnnnnnnnnnnnnnnnnnnnnnnnnnnnnnnnnnnnnnnnnnnnnnnnnnnnnnnnnnnnnnnnnnnnnnnnnnnnnnnnnnnnnnnnnnnnnnnnnnnnnnnnnnnnnnnnnnnnnnnnnnnnnnnnnnnnnnnnnnnnnnnnnnnnnnnnnnnnnnnnnnnnnnnnnnnnnnnnnnnnnnnnnnnnnnnnnnnnnnnnnnnnnnnnnnnnnnnnnnnnnnnnnnnnnnnnnnnnnnnnnnnnnnnnnnnnnnnnnnnnnnnnnnnnnnnnnnnnnnnnnnnnnnnnnnnnnnnnnnnnnnnnnnnnnnnnnnnnnnnnnnnnnnnnnnnnnnnnnnnnnnnnnnnnnnnnnnnnnnnnnnnnnnnnnnnnnnnnnnnnnnnnnnnnnnnnnnnnnnnnnnnnnnnnnnnnnnnnnnnnnnnnnnnnnnnnnnnnnnnnnnnnnnnnnnnnnnnnnnnnnnnnnnnnnnnnnnnnnnnnnnnnnnnnnnnnnnnnnnnnnnnnnnnnnnnnnnnnnnnnnnnnnnnnnnnnnnnnnnnnnnnnnnnnnnnnnnnnnnnnnnnnnnnnnnnnnnnnnnnnnnnnnnnnnnnnnnnnnnnnnnnnnnnnnnnnnnnnnnnnnnnnnnnnnnnnnnnnnnnnnnnnnnnnnnnnnnnnnnnnnnnnnnnnnnnnnnnnnnnnnnnnnnnnnnnnnnnnnnnnnnnnnnnnnnnnnnnnnnnnnnnnnnnnnnnnnnnnnnnnnnnnnnnnnnnnnnnnnnnnnnnnnnnnnnnnnnnnnnnnnnnnnnnnnnnnnnnnnnnnnnnnnnnnnnnnnnnnnnnnnnnnnnnnnnnnnnnnnnnnnnnnnnnnnnnnnnnnnnnnnnnnnnnnnnnnnnnnnnnnnnnnnnnnnnnnnnnnnnnnnnnnnnnnnnnnnnnnnnnnnnnnnnnnnnnnnnnnnnnnnnnnnnnnnnnnnnnnnnnnnnnnnnnnnnnnnnnnnnnnnnnnnnnnnnnnnnnnnnnnnnnnnnnnnnnnnnnnnnnnnnnnnnnnnnnnnnnnnnnnnnnnnnnnnnnnnnnnnnnnnnnnnnnnnnnnnnnnnnnnnnnnnnnnnnnnnnnnnnnnnnnnnnnnnnnnnnnnnnnnnnnnnnnnnnnnnnnnnnnnnnnnnnnnnnnnnnnnnnnnnnnnnnnnnnnnnnnnnnnnnnnnnnnnnnnnnnnnnnnnnnnnnnnnnnnnnnnnnnnnnnnnnnnnnnnnnnnnnnnnnnnnnnnnnnnnnnnnnnnnnnnnnnnnnnnnnnnnnnnnnnnnnnnnnnnnnnnnnnnnnnnnnnnnnnnnnnnnnnnnnnnnnnnnnnnnnnnnnnnnnnnnnnnnnnnnnnnnnnnnnnnnnnnnnnnnnnnnnnnnnnnnnnnnnnnnnnnnnnnnnnnnnnnnnnnnnnnnnnnnnnnnnnnnnnnnnnnnnnnnnnnnnnnnnnnnnnnnnnnnnnnnnnnnnnnnnnnnnnnnnnnnnnnnnnnnnnnnnnnnnnnnnnnnnnnnnnnnnnnnnnnnnnnnnnnnnnnnnnnnnnnnnnnnnnnnnnnnnnnnnnnnnnnnnnnnnnnnnnnnnnnnnnnnnnnnnnnnnnnnnnnnnnnnnnnnnnnnnnnnnnnnnnnnnnnnnnnnnnnnnnnnnnnnnnnnnnnnnnnnnnnnnnnnnnnnnnnnnnnnnnnnnnnnnnnnnnnnnnnnnnnnnnnnnnnnnnnnnnnnnnnnnnnnnnnnnnnnnnnnnnnnnnnnnnnnnnnnnnnnnnnnnnnnnnnnnnnnnnnnnnnnnnnnnnnnnnnnnnnnnnnnnnnnnnnnnnnnnnnnnnnnnnnnnnnnnnnnnnnnnnnnnnnnnnnnnnnnnnnnnnnnnnnnnnnnnnnnnnnnnnnnnnnnnnnnnnnnnnnnnnnnnnnnnnnnnnnnnnnnnnnnnnnnnnnnnnnnnnnnnnnnnnnnnnnnnnnnnnnnnnnnnnnnnnnnnnnnnnnnnnnnnnnnnnnnnnnnnnnnnnnnnnnnnnnnnnnnnnnnnnnnnnnnnnnnnnnnnnnnnnnnnnnnnnnnnnnnnnnnnnnnnnnnnnnnnnnnnnnnnnnnnnnnnnnnnnnnnnnnnnnnnnnnnnnnnnnnnnnnnnnnnnnnnnnnnnnnnnnnnnnnnnnnnnnnnnnnnnnnnnnnnnnnnnnnnnnnnnnnnnnnnnnnnnnnnnnnnnnnnnnnnnnnnnnnnnnnnnnnnnnnnnnnnnnnnnnnnnnnnnnnnnnnnnnnnnnnnnnnnnnnnnnnnnnnnnnnnnnnnnnnnnnnnnnnnnnnnnnnnnnnnnnnnnnnnnnnnnnnnnnnnnnnnnnnnnnnnnnnnnnnnnnnnnnnnnnnnnnnnnnnnnnnnnnnnnnnnnnnnnnnnnnnnnnnnnnnnnnnnnnnnnnnnnnnnnnnnnnnnnnnnnnnnnnnnnnnnnnnnnnnnnnnnnnnnnnnnnnnnnnnnnnnnnnnnnnnnnnnnnnnnnnnnnnnnnnnnnnnnnnnnnnnnnnnnnnnnnnnnnnnnnnnnnnnnnnnnnnnnnnnnnnnnnnnnnnnnnnnnnnnnnnnnnnnnnnnnnnnnnnnnnnnnnnnnnnnnnnnnnnnnnnnnnnnnnnnnnnnnnnnnnnnnnnnnnnnnnnnnnnnnnnnnnnnnnnnnnnnnnnnnnnnnnnnnnnnnnnnnnnnnnnnnnnnnnnnnnnnnnnnnnnnnnnnnnnnnnnnnnnnnnnnnnnnnnnnnnnnnnnnnnnnnnnnnnnnnnnnnnnnnnnnnnnnnnnnnnnnnnnnnnnnnnnnnnnnnnnnnnnnnnnnnnnnnnnnnnnnnnnnnnnnnnnnnnnnnnnnnnnnnnnnnnnnnnnnnnnnnnnnnnnnnnnnnnnnnnnnnnnnnnnnnnnnnnnnnnnnnnnnnnnnnnnnnnnnnnnnnnnnnnnnnnnnnnnnnnnnnnnnnnnnnnnnnnnnnnnnnnnnnnnnnnnnnnnnnnnnnnnnnnnnnnnnnnnnnnnnnnnnnnnnnnnnnnnnnnnnnnnnnnnnnnnnnnnnnnnnnnnnnnnnnnnnnnnnnnnnnnnnnnnnnnnnnnnnnnnnnnnnnnnnnnnnnnnnnnnnnnnnnnnnnnnnnnnnnnnnnnnnnnnnnnnnnnnnnnnnnnnnnnnnnnnnnnnnnnnnnnnnnnnnnnnnnnnnnnnnnnnnnnnnnnnnnnnnnnnnnnnnnnnnnnnnnnnnnnnnnnnnnnnnnnnnnnnnnnnnnnnnnnnnnnnnnnnnnnnnnnnnnnnnnnnnnnnnnnnnnnnnnnnnnnnnnnnnnnnnnnnnnnnnnnnnnnnnnnnnnnnnnnnnnnnnnnnnnnnnnnnnnnnnnnnnnnnnnnnnnnnnnnnnnnnnnnnnnnnnnnnnnnnnnnnnnnnnnnnnnnnnnnnnnnnnnnnnnnnnnnnnnnnnnnnnnnnnnnnnnnnnnnnnnnnnnnnnnnnnnnnnnnnnnnnnnnnnnnnnnnnnnnnnnnnnnnnnnnnnnnnnnnnnnnnnnnnnnnnnnnnnnnnnnnnnnnnnnnnnnnnnnnnnnnnnnnnnnnnnnnnnnnnnnnnnnnnnnnnnnnnnnnnnnnnnnnnnnnnnnnnnnnnnnnnnnnnnnnnnnnnnnnnnnnnnnnnnnnnnnnnnnnnnnnnnnnnnnnnnnnnnnnnnnnnnnnnnnnnnnnnnnnnnnnnnnnnnnnnnnnnnnnnnnnnnnnnnnnnnnnnnnnnnnnnnnnnnnnnnnnnnnnnnnnnnnnnnnnnnnnnnnnnnnnnnnnnnnnnnnnnnnnnnnnnnnnnnnnnnnnnnnnnnnnnnnnnnnnnnnnnnnnnnnnnnnnnnnnnnnnnnnnnnnnnnnnnnnnnnnnnnnnnnnnnnnnnnnnnnnnnnnnnnnnnnnnnnnnnnnnnnnnnnnnnnnnnnnnnnnnnnnnnnnnnnnnnnnnnnnnnnnnnnnnnnnnnnnnnnnnnnnnnnnnnnnnnnnnnnnnnnnnnnnnnnnnnnnnnnnnnnnnnnnnnnnnnnnnnnnnnnnnnnnnnnnnnnnnnnnnnnnnnnnnnnnnnnnnnnnnnnnnnnnnnnnnnnnnnnnnnnnnnnnnnnnnnnnnnnnnnnnnnnnnnnnnnnnnnnnnnnnnnnnnnnnnnnnnnnnnnnnnnnnnnnnnnnnnnnnnnnnnnnnnnnnnnnnnnnnnnnnnnnnnnnnnnnnnnnnnnnnnnnnnnnnnnnnnnnnnnnnnnnnnnnnnnnnnnnnnnnnnnnnnnnnnnnnnnnnnnnnnnnnnnnnnnnnnnnnnnnnnnnnnnnnnnnnnnnnnnnnnnnnnnnnnnnnnnnnnnnnnnnnnnnnnnnnnnnnnnnnnnnnnnnnnnnnnnnnnnnnnnnnnnnnnnnnnnnnnnnnnnnnnnnnnnnnnnnnnnnnnnnnnnnnnnnnnnnnnnnnnnnnnnnnnnnnnnnnnnnnnnnnnnnnnnnnnnnnnnnnnnnnnnnnnnnnnnnnnnnnnnnnnnnnnnnnnnnnnnnnnnnnnnnnnnnnnnnnnnnnnnnnnnnnnnnnnnnnnnnnnnnnnnnnnnnnnnnnnnnnnnnnnnnnnnnnnnnnnnnnnnnnnnnnnnnnnnnnnnnnnnnnnnnnnnnnnnnnnnnnnnnnnnnnnnnnnnnnnnnnnnnnnnnnnnnnnnnnnnnnnnnnnnnnnnnnnnnnnnnnnnnnnnnnnnnnnnnnnnnnnnnnnnnnnnnnnnnnnnnnnnnnnnnnnnnnnnnnnnnnnnnnnnnnnnnnnnnnnnnnnnnnnnnnnnnnnnnnnnnnnnnnnnnnnnnnnnnnnnnnnnnnnnnnnnnnnnnnnnnnnnnnnnnnnnnnnnnnnnnnnnnnnnnnnnnnnnnnnnnnnnnnnnnnnnnnnnnnnnnnnnnnnnnnnnnnnnnnnnnnnnnnnnnnnnnnnnnnnnnnnnnnnnnnnnnnnnnnnnnnnnnnnnnnnnnnnnnnnnnnnnnnnnnnnnnnnnnnnnnnnnnnnnnnnnnnnnnnnnnnnnnnnnnnnnnnnnnnnnnnnnnnnnnnnnnnnnnnnnnnnnnnnnnnnnnnnnnnnnnnnnnnnnnnnnnnnnnnnnnnnnnnnnnnnnnnnnnnnnnnnnnnnnnnnnnnnnnnnnnnnnnnnnnnnnnnnnnnnnnnnnnnnnnnnnnnnnnnnnnnnnnnnnnnnnnnnnnnnnnnnnnnnnnnnnnnnnnnnnnnnnnnnnnnnnnnnnnnnnnnnnnnnnnnnnnnnnnnnnnnnnnnnnnnnnnnnnnnnnnnnnnnnnnnnnnnnnnnnnnnnnnnnnnnnnnnnnnnnnnnnnnnnnnnnnnnnnnnnnnnnnnnnnnnnnnnnnnnnnnnnnnnnnnnnnnnnnnnnnnnnnnnnnnnnnnnnnnnnnnnnnnnnnnnnnnnnnnnnnnnnnnnnnnnnnnnnnnnnnnnnnnnnnnnnnnnnnnnnnnnnnnnnnnnnnnnnnnnnnnnnnnnnnnnnnnnnnnnnnnnnnnnnnnnnnnnnnnnnnnnnnnnnnnnnnnnnnnnnnnnnnnnnnnnnnnnnnnnnnnnnnnnnnnnnnnnnnnnnnnnnnnnnnnnnnnnnnnnnnnnnnnnnnnnnnnnnnnnnnnnnnnnnnnnnnnnnnnnnnnnnnnnnnnnnnnnnnnnnnnnnnnnnnnnnnnnnnnnnnnnnnnnnnnnnnnnnnnnnnnnnnnnnnnnnnnnnnnnnnnnnnnnnnnnnnnnnnnnnnnnnnnnnnnnnnnnnnnnnnnnnnnnnnnnnnnnnnnnnnnnnnnnnnnnnnnnnnnnnnnnnnnnnnnnnnnnnnnnnnnnnnnnnnnnnnnnnnnnnnnnnnnnnnnnnnnnnnnnnnnnnnnnnnnnnnnnnnnnnnnnnnnnnnnnnnnnnnnnnnnnnnnnnnnnnnnnnnnnnnnnnnnnnnnnnnnnnnnnnnnnnnnnnnnnnnnnnnnnnnnnnnnnnnnnnnnnnnnnnnnnnnnnnnnnnnnnnnnnnnnnnnnnnnnnnnnnnnnnnnnnnnnnnnnnnnnnnnnnnnnnnnnnnnnnnnnnnnnnnnnnnnnnnnnnnnnnnnnnnnnnnnnnnnnnnnnnnnnnnnnnnnnnnnnnnnnnnnnnnnnnnnnnnnnnnnnnnnnnnnnnnnnnnnnnnnnnnnnnnnnnnnnnnnnnnnnnnnnnnnnnnnnnnnnnnnnnnnnnnnnnnnnnnnnnnnnnnnnnnnnnnnnnnnnnnnnnnnnnnnnnnnnnnnnnnnnnnnnnnnnnnnnnnnnnnnnnnnnnnnnnnnnnnnnnnnnnnnnnnnnnnnnnnnnnnnnnnnnnnnnnnnnnnnnnnnnnnnnnnnnnnnnnnnnnnnnnnnnnnnnnnnnnnnnnnnnnnnnnnnnnnnnnnnnnnnnnnnnnnnnnnnnnnnnnnnnnnnnnnnnnnnnnnnnnnnnnnnnnnnnnnnnnnnnnnnnnnnnnnnnnnnnnnnnnnnnnnnnnnnnnnnnnnnnnnnnnnnnnnnnnnnnnnnnnnnnnnnnnnnnnnnnnnnnnnnnnnnnnnnnnnnnnnnnnnnnnnnnnnnnnnnnnnnnnnnnnnnnnnnnnnnnnnnnnnnnnnnnnnnnnnnnnnnnnnnnnnnnnnnnnnnnnnnnnnnnnnnnnnnnnnnnnnnnnnnnnnnnnnnnnnnnnnnnnnnnnnnnnnnnnnnnnnnnnnnnnnnnnnnnnnnnnnnnnnnnnnnnnnnnnnnnnnnnnnnnnnnnnnnnnnnnnnnnnnnnnnnnnnnnnnnnnnnnnnnnnnnnnnnnnnnnnnnnnnnnnnnnnnnnnnnnnnnnnnnnnnnnnnnnnnnnnnnnnnnnnnnnnnnnnnnnnnnnnnnnnnnnnnnnnnnnnnnnnnnnnnnnnnnnnnnnnnnnnnnnnnnnnnnnnnnnnnnnnnnnnnnnnnnnnnnnnnnnnnnnnnnnnnnnnnnnnnnnnnnnnnnnnnnnnnnnnnnnnnnnnnnnnnnnnnnnnnnnnnnnnnnnnnnnnnnnnnnnnnnnnnnnnnnnnnnnnnnnnnnnnnnnnnnnnnnnnnnnnnnnnnnnnnnnnnnnnnnnnnnnnnnnnnnnnnnnnnnnnnnnnnnnnnnnnnnnnnnnnnnnnnnnnnnnnnnnnnnnnnnnnnnnnnnnnnnnnnnnnnnnnnnnnnnnnnnnnnnnnnnnnnnnnnnnnnnnnnnnnnnnnnnnnnnnnnnnnnnnnnnnnnnnnnnnnnnnnnnnnnnnnnnnnnnnnnnnnnnnnnnnnnnnnnnnnnnnnnnnnnnnnnnnnnnnnnnnnnnnnnnnnnnnnnnnnnnnnnnnnnnnnnnnnnnnnnnnnnnnnnnnnnnnnnnnnnnnnnnnnnnnnnnnnnnnnnnnnnnnnnnnnnnnnnnnnnnnnnnnnnnnnnnnnnnnnnnnnnnnnnnnnnnnnnnnnnnnnnnnnnnnnnnnnnnnnnnnnnnnnnnnnnnnnnnnnnnnnnnnnnnnnnnnnnnnnnnnnnnnnnnnnnnnnnnnnnnnnnnnnnnnnnnnnnnnnnnnnnnnnnnnnnnnnnnnnnnnnnnnnnnnnnnnnnnnnnnnnnnnnnnnnnnnnnnnnnnnnnnnnnnnnnnnnnnnnnnnnnnnnnnnnnnnnnnnnnnnnnnnnnnnnnnnnnnnnnnnnnnnnnnnnnnnnnnnnnnnnnnnnnnnnnnnnnnnnnnnnnnnnnnnnnnnnnnnnnnnnnnnnnnnnnnnnnnnnnnnnnnnnnnnnnnnnnnnnnnnnnnnnnnnnnnnnnnnnnnnnnnnnnnnnnnnnnnnnnnnnnnnnnnnnnnnnnnnnnnnnnnnnnnnnnnnnnnnnnnnnnnnnnnnnnnnnnnnnnnnnnnnnnnnnnnnnnnnnnnnnnnnnnnnnnnnnnnnnnnnnnnnnnnnnnnnnnnnnnnnnnnnnnnnnnnnnnnnnnnnnnnnnnnnnnnnnnnnnnnnnnnnnnnnnnnnnnnnnnnnnnnnnnnnnnnnnnnnnnnnnnnnnnnnnnnnnnnnnnnnnnnnnnnnnnnnnnnnnnnnnnnnnnnnnnnnnnnnnnnnnnnnnnnnnnnnnnnnnnnnnnnnnnnnnnnnnnnnnnnnnnnnnnnnnnnnnnnnnnnnnnnnnnnnnnnnnnnnnnnnnnnnnnnnnnnnnnnnnnnnnnnnnnnnnnnnnnnnnnnnnnnnnnnnnnnnnnnnnnnnnnnnnnnnnnnnnnnnnnnnnnnnnnnnnnnnnnnnnnnnnnnnnnnnnnnnnnnnnnnnnnnnnaggatcccccgcctcacgggtgctaatgtgctggtggagaggacgatcgttgtaatgggtgcggaggcttgcttggcgatgtgtggagggatggcgctgtgaggcggttgtgtgtcgttttgtttggtgtgttttgtggcgagttggcgtgtgcgtgtgtgtgtgtgtgtgttggtctgagcgcgtcgattgcgttgcggtttgggtttgtgtctgggcgcttagctcaaatggtagagcgcccgcttcgcatgcgggaggtaggggggtcgatacccccagtgtccactttttacggcacacaacactttttacgaacaaacactttttaccgcccctcgcgccgctgcttgcttcctagccttcctacccctgctcacccgccacccaagctcacccgccatctgcgagcgtgctggtgcctacgtttacagacgacccaccttttttgtcggcgagtgtggggcaaccacgccgactgccaggcgcaggatcccacaagagtttgggcatgagggagaccggctaaacagctcaccgagagcctggtcagcgccacagaccaaacgcccagctgtgtgctgtgtgctctgtgctctgtgctgtgtgtcacctctgtccgggccactggccggtcggacgagtagggttcgagtcagccagctgcttgacatttttgttttcggaggcgggtagctcccggcctggcggttcgaggcttcgggtatgtgaggcagtggaccatggcggagcgcggagaatcgacaaggcgtggatgctggcgcctcacgggtgctaatgtgctggtggagaggacgatcgttgtaatgggtgcggaggcttgcttggcgatgtgtggagggatggcgctgtgaggcggttgtgtgtggttttgtttggtgtgttttgtggcgagttggcgtgtgcgtgtgtgtgtgtgtgtgttggtctgagcgcgtcgattgcgttgcggtttgggtttgtgtctgggcgcttagctcaaatggtagagcgcccgcttcgcatgcgggaggtagggggatcgatacccccagtgtccactttttacggcacacaacactttttacgaacaaacactttttaccgcccctcgcgccgctgcttgcttcctagccttcctacccctgctcacccgccacccaagctcacccgccatctgcgagcgtgctggtgcctacgtttacagacgacccaccttttttgtcggcgagtgtggggcaaccacgccgactgccaggcgcaggatcccacaagagtttgggcatgagggagaccggctaaacagctcaccgagagcctggtcagcgccacagaccaaacgcccagctttgtgctgtgtgctctgtgctctgtgctgtgtgtcacctctgtccgggccactggccggtcggacgagtagggttcgagtcagccagctgcttgacatttttgttttcggaggcgggtggctcccggcctggcggttcgaggcttcgggtatgtgaggcagtggaccatggcggagcgcggagaatcgacaaggcgtggatgctggcgcctcacgggtgctaatgtgctggtggagaggacgatcgttgtaatgggtgcggaggcttgcttggcgatgtgtggagggatggcgctgtgaggcggttgtgcgtcgttttgtttggtgtgttttgtggcgagttggcgtgtgcgtgtgtgtgtgttggtctgagcgcgtcgattgcgttgcggtttgggtttgtgtctgggcgcttagctcaaatggtagagcgcccgcttcgcatgcgggaggtagggggatcgatacccccagtgtccactttttacggcacacaacactttttacgaacaaacactttttaccgcccctcgcgccgctgcttgcttcctagccttcctacccctgctcacccgccacccacagctcacccgccatctgcgagcgtgctggtgcctacgtttacagacgacccaccttttttgtcggcgagtgtggggcaaccacgccgactgccaggcgcaggatcccacaagagtttgggcatgagggagaccggctaaacagctcaccgagagcctggtcagcgccacagaccaaacgcccagctgtgtgctgtgtgctctgtgctctgtgctgtgtgtcacctctgtccgggccactggccggtcggacgagtagggttcgagtcagccagctgcttgacatttttgttttcggaggcgggtggctcccggcctggcggttcgaggcttcgggtatgtgaggcagtggaccatggcggagcgcggagaatcgacaaggcgtggatgctggcgcctcacgggtgctaatgtgctggtggagaggacgatcgttgtaatgggtgcggaggcttgcttggcgatgtgtggagggatggcgctgtgaggcggttgtgtgtggttttgtttggtgtgttttgtggcgagttggcgtgtgcgtgtgtgtgtgtgtgtgtgtgttggtctgagcgcgtcgattgcgttgcggtttgggtttgtgtctgggcgcttagctcaaatggtagagcgcccgcttcgcatgcggatcgatacccccagtgtccacttttacggcacgcaacactttttacgaacaaacactttttaccgcccctcgcgccgctgcttgcttcctagccttcctacccctgctcacccgccacccacagctcacccgccatctgcgagcgtgctggtgcctacgtttacagacgacccaccttttttgtcggcgagtgtggggcaaccacgccgactgccaggcgcaggatcccacaagagtttgggcatgagggagaccggctaaacagctcaccgagagcctggtcagcgccacagaccaaacgcccagctgtgtgctgtgtgctctgtgctctgtgctgtgtgtcacctctgtccgggccactggccggtcggacgagtagggttcgagtcagccagctgcttgacatttttgttttcggaggcgggtagctcccggcctggcggttcgaggcttcgggtatgtgaggcagtggaccatggcggagcgcggagaatcgacaaggcgtggatgctggcgcctcacgggtgctaatgtgctggtggagaggacgatcgttgtaatgggtgcggaggcttgcttggcgatgtgtggagggatggcgctgtgaggcggttgtgtgtcattttgtttggtgtgttttgtggcgagttggcgtgtgcgtgtgtgtgtgtgtgtgttggtctgagcgcgtcgattgcgttgcggtttgggtttgtgtctgggcgcttagctcaaatggtagagcgcccgcttcgcatgcgggaggtagggggatcgatacccccagtgtccactttttacggcacacaacactttttacgaacaaacactttttaccgcccctcgcgccgctgcttgcttcctagccttcctacccctgctcacccgccacccacagctcacccgccatctgcgagcgtgctggtgcctacgtttacagacgacccaccttttttgtcggcgagtgtggggcaaccacgccgactgccaggcgcaggatcccacaagagtttgggcatgagggagaccggctaaacagctcaccgagagcctggtcagcgccacagaccaaacgcccagctgtgtgctgtgtgctctgtgctctgtgctgtgtgtcacctctgtctgggcgggttcgagtcagccagctgcttgacatttttgttttcggaggcgggtggctcccggcctggcggttcgaggcttcgggtatgtgaggcagtggaccatggcggagcgcggagaatcgacaaggcgtggatgctggcgcctcacgggtgctaatgtgctggtggagaggacgatcgttgtaatgggtgcggaggcttgcttggcgatgtgtggagggatggcgctgtgaggcggttgtgtgtggttttgtttggtgtgttttgtggcgagttggcgtgtgcgtgtgtgtgtgtgtgtgttggtctgagcgcgtcgattgcgttgcggtttgggtttgtgtctgggcgcttagctcaaatggtagagcgcccgcttcgcatgcgggaggtagggggatcgatacccccagtgtccactttttacggcacacaacactttttacgaacaaacactttttaccgcccctcgcgccgctgcttgcttcctagccttcctacccctgctcacccgccacccacagctcacccgccatctgcgagcgtgctggtgcctacgtttacagacgacccaccttttttgtcggcgagtgtggggcaaccacgccgactgccaggcgcaggatcccacaagagtttgggcatgagggagaccggctaaacagctcaccgagagcctggtcagcgccacagaccaaacgcccagctgtgtgctgtgtgctctgtgctctgtgctgtgtgtcacctctgtccgggcgggttcgagtcagccagctgcttgacatttttgttttcggaggcgggtggctcccggcctggcggttcgaggcttcgggtatgtgaggcagtggaccatggcggagcgcggagaatcgacaaggcgtggatgctggcgcctcacgggtgctaatgtgctggtggagaggacgatcgttgtaatgggtgcggaggcttgcttggcgatgtgtggagggatggcgctgtgaggcggttgtgtgtggttttgtttggtgtgttttgtggcgagttggcgtgtgcgtgtgtgtgtgtgtgttggtctgagcgcgtcgattgcgttgcggtttgggtttgtgtctgggcgcttagctcaaatggtagagcgcccgcttcgcatgcgggaggtagggggatcgatacccccagtgtccactttttacggcacacaacactttttacgaacaaacactttttaccgcccctcgcgccgctgcttgcttcctagccttcctacccctgctcacccgccacccacagctcacccgccatctgcgagcgtgctggtgcctacgtttacagacgacccaccttttttgtcggcgagtgtggggcaaccacgccgactgccaggcgcaggatcccacaagagtttgggcatgagggagaccggctaaacagctcaccgagagcctggtcagcgccacagaccaaacgcccagctgtgtgctgtgtgctctgtgctctgtgctgtgtgtcacctctgtccgggccactggccggtcggacgagtagggttcgagtcagccagctgcttgacatttttgttttcggaggcgggtggctcccggcctggcggttcgaggcttcgggtatgtgaggcagtggaccatggcggagcgcggagaatcgacaaggcgtggatgctggcgcctcacgggtgctaatgtgctggtggagaggacgatcgttgtaatgggtgcggaggcttgcttggcgatgtgtggagggatggcgctgtgaggcggttgtgtgtggttttgtttggtgtgttttgtggcgagttggcgtgtgcgtgtgtgtgtgtgtgttggtctgagcgcgtcgattgcgttgcggtttgggtttgtgtctgggcgcttagctcaaatggtagagcgcccgcttcgcatgcgggaggtagggggatcgatacccccagtgtccactttttacggcacacaacactttttacgaacaaacactttttaccgcccctcgcgccgctgcttgcttcctagccttcctacccctgctcacccgccacccacagctcacccgccatctgcgagcgtgctggtgcctacgtttacagacgacccaccttttttgtcggcgagtgtggggcaaccacgccgactgccaggcgcaggatcccacaagagtttgggcatgagggagaccggctaaacagctcaccgagagcctggtcagcgccacagaccaaacgcccagctgtgtgctgtgtgctctgtgctgtgtgtcacctctgtccgggccactggccggtcggacgagtagggttcgagtcagccagctgcttgacatttttgttttcggaggcgggtggctcccggcctggcggttcgaggcttcgggtatgtgaggcagtggaccatggcggagcgcggagaatcgacaaggcgtggatgctggcgcctcacgggtgctaatgtgctggtggagaggacgatcgttgtaatgggtgcggaggcttgcttggcgatgtgtggagggatggcgctgtgaggcggttgtgtgtggttttgtttggtgtgttttgtggcgagttggcgtgtgcgtgtgtgtgtgtgtgtgtgttggtctgagcgcgtcgattgcgttgcggtttgggtttgtgtctgggcgcttagctcaaatggtagagcgcccgcttcgcatgcgggaggtagggggatcgatacccccagtgtccactttttacggcacacaacactttttacgaacaaacactttttaccgcccctcgcgccgctgcttgcttcctagccttcctacccctgctcacccgccacccaagctcacccgccatctgcgagcgtgctggtgcctacgtttacagacgacccaccttttttgtcggcgagtgtggggcaaccacgccgactgccaggcgcaggatcccacaagagtttgggcatgagggagaccggctaaacagctcaccgagagcctggtcagcgccacagaccaaacgcccagctgtgtgctgtgtgctctgtgctctgtgctgtgtgtcacctctgtccgggccactggccggtcggacgagtagggttcgagtcagccagctgcttgacatttttgttttcggaggcgggtggctcccggcctggcggttcgaggcttcgggtatgtgaggcagtggaccatggcggagcgcggagaatcgacaaggcgtggatgctggcgcctcacgggtgctaatgtgctggtggagaggacgatcgttgtaatgggtgcggaggcttgcttggcgatgtgtggagggatggcgctgtgaggcggttgtgtgtggttttgtttggtgtgttttgtggcgagttggcgtgtgcgtgtgtgtgtgtgtgtgtgttggtctgagcgcgtcgattgcgttgcggtttgggtttgtgtctgggcgcttagctcaaatggtagagcgcccgcttcgcatgcgggaggtagggggatcgatacccccagtgtccactttttacggcacacaacactttttacgaacaaacactttttaccgcccctcgcgccgctgcttgcttcctagccttcctacccctgctcacccgccacccaagctcacccgccatctgcgagcgtgctggtgcctacgtttacagacgacccaccttttttgtcggcgagtgtggggcaaccacgccgactgccaggcgcaggatcccacaagagtttgggcatgagggagaccggctaaacagctcaccgagagcctggtcagcgccacagaccaaacgcccagctttgtgctgtgtgctctgtgctgtgtgctgtgtgtcacctctgtccgggccactggccggtcggacgagtagggttcgagtcagccagctgcttgacatttttgttttcggaggcgggtggctcccggcctggcggttcgaggcttcgggtatgtgaggcagtggaccatggcggagcgcggagaatcgacaaggcgtggatgctggcgcctcacgggtgctaatgtgctggtggagaggacgatcgttgtaatgggtgcggaggcttgcttggcgatgtgtggagggatggcgctgtgaggcggttgtgtgtcgttttgtttggtgtgttttgtggcgagttggcgtgtgcgtgtgtgtgtgtgtgtgttggtctgagcgcgtcgattgcgttgcggtttgggtttgtgtctgggcgcttagctcaaatggtagagcgcccgcttcgcatgcgggaggtagggggatcgatacccccagtgtccactttttacggcacacaacactttttacgaacaaacactttttaccgcccctcgcgccgctgcttgcttcctagccttcctacccctgctcacccgccacccaagctcacccgccatctgcgagcgtgctggtgcctacgtttacagacgacccaccttttttgtcggcgagtgtggggcaaccacgccgactgccaggcgcaggatcccacaagagtttgggcatgagggagaccggctaaacagctcaccgagagcctggtcagcgccacagaccaaacgcccagctttgtgctgtgtgctctgtgctctgtgctgtgtgtcacctctgtccgggccactggccggtcggacgagtagggttcgagtcagccagctgcttgacatttttgttttcggaggcgggtggctcccggcctggcggttcgaggcttcgggtatgtgaggcagtggaccatggcggagcgcggagaatcgacaaggcgtggatgctggcgcctcacgggtgctaatgtgctggtggagaggacgatcgttgtaatgggtgcggaggcttgcttggcgatgtgtggagggatggcgctgtgaggcggttgtgtgtggttttgtttggtgtgttttgtggcgagttggcgtgtgcgtgtgtgtgtgtgtgtgtgttggtctgagcgcgtcgattgcgttgcggtttgggtttgtgtctgggcgcttagctcaaatggtagagcgcccgcttcgcatgcgggaggtagggggatcgatacccccagtgtccactttttacggcacacaacactttttacgaacaaacactttttaccgcccctcgcgccgctgcttgcttcctagccttcctacccctgctcacccgccacccaagctcacccgccatctgcgagcgtgctggtgcctacgtttacagacgacccaccttttttgtcggcgagtgtggggcaaccacgccgactgccaggcgcaggatcccacaagagtttgggcatgagggagaccggctaaacagctcaccgagagcctggtcagcgccacagaccaaacgcccagctttgtgctgtgtgctctgtgctctgtgctgtgtgtcacctctgtccgggccactggccggtcggacgagtagggttcgagtcagccagctgcttgacatttttgttttcggaggcgggtggctcccggcctggcggttcgaggcttcgggtatgtgaggcagtggaccatggcggagcgcggagaatcgacaaggcgtggatgctggcgcctcacgggtgctaatgtgctggtggagaggacgatcgttgtaatgggtgcggaggcttgcttggcgatgtgtggagggatggcgctgtgaggcggttgtgcgtcgttttgtttggtgtgttttgtggcgagttggcgtgtgcgtgtgtgtgtgtgtgtgttggtctgagcgcgtcgattgcgttgcggtttgggtttgtgtctgggcgcttagctcaaatggtagagcgcccgcttcgcatgcgggaggtaggggggtcgatacccccagtgtccactttttacggcacacaacactttttacgaacaaacactttttaccgcccctcgcgccgctgcttgcttcctagccttcctacccctgctcacccgccacccaagctcacccgccatctgcgagcgtgctggtgcctacgtttacagacgacccaccttttttgtcggcgagtgtggggcaaccacgccgactgccaggcgcaggatcccacaagagtttgggcatgagggagaccggctaaacagctcaccgagagcctggtcagcgccacagaccaaacgcccagctgtgtgctgtgtgctctgtgctctgtgctgtgtgtcacctctgtccgggccactggccggtcggacgagtagggttcgagtcagccagctgcttgacatttttgttttcggaggcgggtggctcccggcctggcggttcgaggcttcgggtatgtgaggcagtggaccatggcggagcgcggagaatcgacaaggcgtggatgctggcgcctcacgggtgctaatgtgctggtggagaggacgatcgttgtaatgggtgcggaggcttgcttggcgatgtgtggagggatggcgctgtgaggcggttgtgcgtcattttgtttggtgtgttttgtggcgagttggcgtgtgcgtgtgtgtgtgtgtgttggtctgagcgcgtcgattgcgttgcggtttgggtttgtgtctgggcgcttagctcaaatggtagagcgcccgcttcgcatgcgggaggtagggggatcgatacccccagtgtccactttttacggcacacaacactttttacgaacaaacactttttaccgcccctcgcgccgctgcttgcttcctagccttcctacccctgctcacccgccacccacagctcacccgccatctgcgagcgtgctggtgcctacgtttacagacgacccaccttttttgtcggcgagtgtggggcaaccacgccgactgccaggcgcaggatcccacaagagtttgggcatgagggagaccggctaaacagctcaccgagagcctggtcagcgccacagaccaaacgcccagctgtgtgctgtgtgctctgtgctctgtgctgtgtgtcacctctgtccgggccactggccggtcggacgagtagggttcgagtcagccagctgcttgacatttttgtttcggaggcgggtggctcccggcctggcggttcgaggcttcgggtatgtgaggcagtggaccatggcggagcgcggagaatcgacaaggcgtggatgctggcgcctcacgggtgctaatgtgctggtggagaggacgatcgttgtaatgggtgcggaggcttgcttggcgatgtgtggagggatggcgctgtgaggcggttgtgtgtggttttgtttggtgtgttttgtggcgagttggcgtgtgcgtgtgtgtgtgtgtgtgttggtctgagcgcgtcgattgcgttgcggtttgggtttgtgtctgggcgcttagctcaaatggtagagcgcccgcttcgcatgcgggaggtagggggatcgatacccccagtgtccactttttacggcacacaacactttttacgaacaaacactttttaccgcccctcgcgccgctgcttgcttcctagccttcctacccctgctcacccgccacccacagctcacccgccatctgcgagcgtgctggtgcctacgtttacagacgacccaccttttttgtcggcgagtgtggggcaaccacgccgactgccaggcgcaggatcccacaagagtttgggcatgagggagaccggctaaacagctcaccgagagcctggtcagcgccacagaccaaacgcccagctgtgtgctgtgtgctctgtgctgtgtgtcacctctgtccgggccactggccggtcggacgagtagggttcgagtcagccagctgcttgacatttttgtttcggaggcgggtggctcccggcctggcggttcgaggcttcgggtatgtgaggcagtggaccatggcggagcgcggagaatcgacaaggcgtggatgctggcgcctcacgggtgctaatgtgctggtggagaggacgatcgttgtaatgggtgcggaggcttgcttggcgatgtgtggagggatggcgctgtgaggcggttgtgtgtcgttttgtttggtgtgttttgtggcgagttggcgtgtgcgtgtgtgtgtgtgtgttggtctgagcgcgtcgattgcgttgcggtttgggtttgtgtctgggcgcttagctcaaatggtagagcgcccgcttcgcatgcgggaggtagggggatcgatacccccagtgtccactttttacggcacacaacactttttacgaacaaacactttttaccgcccctcgcgccgctgcttgcttcctagccttcctacccctgctcacccgccacccacagctcacccgccatctgcgagcgtgctggtgcctacgtttacagacgacccaccttttttgtcggcgagtgtggggcaaccacgccgactgccaggcgcaggatcccacaagagtttgggcatgagggagaccggctaaacagctcaccgagagcctggtcagcgccacagaccaaacgcccagctgtgtgctgtgtgctctgtgctgtgtgtcacctctgtccgggccactggccggtcggacgagtagggttcgagtcagccagctgcttgacatttttgttttcggaggcgggtggctcccggcctggcggttcgaggcttcgggtatgtgaggcagtggaccatggcggagcgcggagaatcgacaaggcgtggatgctggcgcctcacgggtgctaatgtgctggtggagaggacgatcgttgtaatgggtgcggaggcttgcttggcgatgtgtggagggatggcgctgtgaggcggttgtgcgtcgtttcgtttggtgtgttttgtggcgagttggcgtgtgcgtgtgtgtgtgtgttgttctgagcgcgcnnnnnnnnnnnnnnnnnnnnnnnnnnnnnnnnnnnnnnnnnnnnnnnnnnnnnnnnnnnnnnnnnnnnnnnnnnnnnnnnnnnnnnnnnnnnnnnnnnnnnnnnnnnnnnnnnnnnnnnnnnnnnnnnnnnnnnnnnnnnnnnnnnnnnnnnnnnnnnnnnnnnnnnnnnnnnnnnnnnnnnnnnnnnnnnnnnnnnnnnnnnnnnnnnnnnnnnnnnnnnnnnnnnnnnnnnnnnnnnnnnnnnnnnnnnnnnnnnnnnnnnnnnnnnnnnnnnnnnnnnnnnnnnnnnnnnnnnnnnnnnnnnnnnnnnnnnnnnnnnnnnnnnnnnnnnnnnnnnnnnnnnnnnnnnnnnnnnnnnnnnnnnnnnnnnnnnnnnnnnnnnnnnnnnnnnnnnnnnnnnnnnnnnnnnnnnnnnnnnnnnnnnnnnnnnnnnnnnnnnnnnnnnnnnnnnnnnnnnnnnnnnnnnnnntgtggcgagttggcgtgtgcgtgtgtgtgtgtgtgttggtctgagcgcgtcgattgcgttgcggtttgggtttgtgtctgggcgcttagctcaaatggtagagcgcccgcttcgcatgcggatcgatacccccagtgtccactttttacggcacacaacactttttacgaacaaacactttttaccgcccctcgcgccgctgcttgcttcctagccttcctacccctgctcacccgccacccacagctcacccgccatctgcgagcgtgctggtgcctacgtttacagacgacccaccttttttgtcggcgagtgtggggcaaccacgccgactgccaggcgcaggatcccacaagagtttgggcatgagggagaccggctaaacagctcaccgagagcctggtcagcgccacagaccaaacgcccagctgtgtgctgtgtgctctgtgctgtgtgtcacctctgtccgggccactggccggtcggacgagtagggttcgagtcagccagctgcttgacatttttgttttcggaggcgggtggctcccggcctggcggttcgaggcttcgggtatgtgaggcagtggaccatggcggagcgcggagaatcgacaaggcgtggatgctggcgcctcacgggtgctaatgtgctggtggagaggacgatcgttgtaatgggtgcggaggcttgcttggcgatgtgtggagggatggcgctgtgaggcgattgtgtgtggttttgtttggtgtgttttgtggcgagttggcgtgtgcgtgtgtgtgtgtgtgtgttggtctgagcgcgtcgattgcgttgcggtttgggtttgtgtctgggcgcttagctcaaatggtagagcgcccgcttcgcatgcgggaggtagggggatcgatacccccagtgtccactttttacggcacacaacactttttacgaacaaacactttttaccgcccctcgcgccgctgcttgcttcctagccttcctacccctgctcacccgccacccacagctcacccgccatctgcgagcgtgctggtgcctacgtttacagacgacccaccttttttgtcggcgagtgtggggcaaccacgccgactgccaggcgcaggatcccacaagagtttgggcatgagggagaccggctaaacagctcaccgagagcctggtcagcgccacagaccaaacgcccagctgtgtgctgtgtgctctgtgctgtgtgtcacctctgtccgggccactggccggtcggacgagtagggttcgagtcagccagctgcttgacatttttgttttcggaggcgggtggctcccggcctggcggttcgaggcttcgggtatgtgaggcagtggaccatggcggagcgcggagaatcgacaaggcgtggatgctggcgcctcacgggtgctaatgtgctggtggagaggacgatcgttgtaatgggtgcggaggcttgcttggcgatgtgtggagggatggcgctgtgaggcggttgtgtgtggttttgtttggtgtgttttgtggcgagttggcgtgtgtgtgtgtgtgtgtgtgttggtctgagcgcgtcgattgcgttgcggtttgggtttgtgtctgggcgcttagctcaaatggtagagcgcccgcttcgcatgcgggaggtagggggatcgatacccccagtgtccactttttacggcacacaacactttttacgaacaaacactttttaccgcccctcgcgccgctgcttgcttcctagccttcctacccctgctcacccgccacccacagctcacccgccatctgcgagcgtgctggtgcctacgtttacagacgacccaccttttttgtcggcgagtgtggggcaaccacgccgactgccaggcgcaggatcccacaagagtttgggcatgagggagaccggctaaacagctcaccgagagcctggtcagcgccacagaccaaacgcccagctgtgtgctgtgtgctctgtgctctgtgctgtgtgtcacctctgtccgggccactggccggtcggacgagtagggttcgagtcagccagctgcttgacatttttgttttcggaggcgggtagctcccggcctggcggttcgaggcttcgggtatgtgaggcagtggaccatggcggagcgcggagaatcgacaaggcgtggatgctggcgcctcacgggtgctaatgtgctggtggagaggacgatcgttgtaatgggtgcggaggcttgcttggcgatgtgtggagggatggcgctgtgaggcggttgtgtgtggttttgtttggtgtgttttgtggcgagttggcgtgtgtgtgtgtgtgtgtgtgtgttggtctgagcgcgtcgattgcgttgcggtttgggtttgtgtctgggcgcttagctcaaatggtagagcgcccgcttcgcatgcgggaggtagggggatcgatacccccagtgtccactttttacggcacacaacactttttacgaacaaacactttttaccgcccctcgcgccgctgcttgcttcctagccttcctacccctgctcacccgccacccacagctcacccgccatctgcgagcgtgctggtgcctacgtttacagacgacccaccttttttgtcggcgagtgtggggcaaccacgccgactgccaggcgcaggatcccacaagagtttgggcatgagggagaccggctaaacagctcaccgagagcctggtcagcgccacagaccaaacgcccagctgtgtgctgtgtgctctgtgctctgtgctgtgtgtcacctctgtccgggccactggccggtcggacgagtagggttcgagtcagccagctgcttgacatttttgttttcggaggcgggtagctcccggcctggcggttcgaggcttcgggtatgtgaggcagtggaccatggcggagcgcggagaatcgacaaggcgtggatgctggcgcctcacgggtgctaatgtgctggtggagaggacgatcgttgtaatgggtgcggaggcttgcttggcgatgtgtggagggatggcgctgtgaggcggttgtgtgtggttttgtttggtgtgttttgtggcgagttggcgtgtgcgtgtgtgtgtgtgtgttggtctgagcgcgtcgattgcgttgcggtttgggtttgtgtctgggcgcttagctcaaatggtagagcgcccgcttcgcatgcgggaggcagggggatcgatacccccagtgtccactttttacggcacacaacactttttacgaacaaacactttttaccgcccctcgcgccgctgcttgcttcctagccttcctacccctgctcacccgccacccacagctcacccgccatctgcgagcgtgctggtgcctacgtttacagacgacccaccttttttgtcggcgagtgtggggcaaccacgccgactgccaggcgcaggatcccacaagagtttgggcatgagggagaccggctaaacagctcaccgagagcctggtcagcgccacagaccaaacgcccagctgtgtgctgtgtgctgtgtgctctgtgctctgtgctgtgtgtcacctctgtccgggccactggccggtcggacgagtagggttcgagtcagccagctgcttgacatttttgttttcggaggcgggtggctcccggcctggcggttcgaggcttcgggtatgtgaggcagtggaccatggcggagcgcggagaatcgacaaggcgtggatgctggcgcctcacgggtgctaatgtgctggtggagaggacgatcgttgtaatgggtgcggaggcttgcttggcgatgtgtggagggatggcgctgtgaggcggttgtgtgtggttttgtttggtgtgttttgtggcgagttggcgtgtgcgtgtgtgtgtgtgtgttggtctgagcgcgtcgattgcgttgcggtttgggtttgtgtctgggcgcttagctcaaatggtagagcgcccgcttcgcatgcgggaggtcagtgtccactttttacggcacacaacactttttacgaacaaacaatttttaccgcccctcgcgccgctgcttgcttcctagccttcctacccctgctcacccgccacccacagctcacccgccatctgcgagcgtgctggtgcctacgtttacagacgacccacctttttgtcggcgagtgtggggcaaccacgccgactgccaggcgcaggatcccacaagagtttgggcatgagggagaccggctaaacagctcaccgagagcctggtcagcgccacagaccaaacgcccagctgtgtgctgtgtgctctgtgctctgtgctgtgtgtcacctctgtccgggccactggccggtcggacgagtagggttcgagtcagccagctgcttgacatttttgttttcggaggcgggtggctcccggcctggcggttcgaggcttcgggtatgtgaggcagtggaccatggcggagcgcggagaatcgacaaggcgtggatgctggcgcctcacgggtgctaatgtgctggtggagaggacgatcgttgtaatgggtgcggaggcttgcttggcgatgtgtggagggatggcgctgtgaggcggttgtgtgtggttttgtttggtgtgttttgtggcgagttggcgtgtgcgtgtgtgtgtgtgtgtgttggtctgagcgcgtcgattgcgttgcggtttgggtttgtgtctgggcgcttagctcaaatggtagagcgcccgcttcgcatgcgggaggtagggggatcgatacccccagtgtccactttttacggcacacaacactttttacgaacaaacactttttaccgcccctcgcgccgctgcttgcttcctagccttcctacccctgctcacccgccacccacagctcacccgccatctgcgagcgtgctggtgcctacgtttacagacgacccaccttttttgtcggcgagtgtggggcaaccacgccgactgccaggcgcaggatcccacaagagtttgggcatgagggagaccggctaaacagctcaccgagagcctggtcagcgccacagaccaaacgcccagctgtgtgctgtgtgctctgtgctctgtgctgtgtgtcacctctgtccgggccactggccggtcggacgagtagggttcgagtcagccagctgcttgacatttttgttttcggaggcgggtggctcccggcctggcggttcgaggcttcgggtatgtgaggcagtggaccatggcggagcgcggagaatcgacaaggcgtggatgctggcgcctcacgggtgctaatgtgctggtggagaggacgatcgttgtaatgggtgcggaggcttgcttggcgatgtgtggagggatggcgctgtgaggcggttgtgtgtggttttgtttggtgtgttttgtggcgagttggcgtgtgcgtgtgtgtgtgtgtgtgttggtctgagcgcgtcgattgcgttgcggtttgggtttgtgtctgggcgcttagctcaaatggtagagcgcccgcttcgcatgcgggaggtagggggatcgatacccccagtgtccactttttacggcacacaacactttttaggaacaaacactttttaccgcccctcgcgccgctgcttgcttcttagccttcctacccctgttcacccgccacccaagctcacccgccatctgcgagcgtgctggtgcctacgtttacagacgacccaccttttttgtcggcgagtgtggggcaaccacgccgactgccaggcgcaggatcccacaagagtttgggcatgagggagaccggctaaacagctcaccgagagcctggtcagcgccacagaccaaacgcccagctgtgtgctgtgtgctctgtgctctgtgctgtgtgtcacctctgtccgggccactggccggtcggacgagtagggttcgagtcagccagctgcttgacatttttgttttcggaggcgggtggctcccggcctggcggttcgaggcttcgggtatgtgaggcagtggaccatggcggagcgcggagaatcgacaaggcgtggatgctggcgcctcacgggtgctaatgtgctggtggagaggacgatcgttgtaatgggtgcggaggcttgcttggcgatgtgtggagggatggcgctgtgaggcggttgtgtgtggttttgtttggtgtgttttgtggcgagttggcgtgtgcgtgtgtgtgtgtgtgtgttggtctgagcgcgtcgattgcgttgcggtttgggtttgtgtctgggcgcttagctcaaatggtagagcgcccgcttcgcatgcgggaggtagggggatcgatacccccagtgtccactttttacggcacacaacactttttacgaacaaacactttttaccgcccctcgcgccgctgcttgcttcctagccttcctacccctgctcacccgccacccacagctcacccgccatctgcgagcgtgctggtgcctacgtttacagacgacccaccttttttgtcggcgagtgtggggcaaccacgccgactgccaggcgcaggatcccacaagagtttgggcatgagggagaccggctaaacagctcaccgagagcctggtcagcgccacagaccaaacgcccagctgtgtgctgtgtgctctgtgctgtgtgctgtgtgtcacctctgtctgggcgggttcgagtcagccagctgcttgacatttttgttttcggaggcgggtggctcccggcctggcggttcgaggcttcgggtatgtgaggcagtggaccatggcggagcgcggagaatcgacaaggcgtggatgctggcgcctcacgggtgctaatgtgctggtggagaggacgatcgttgtaatgggtgcggaggcttgcttggcgatgtgtggagggatggcgctgtgaggcggttgtgtgtggttttgtttggtgtgttttgtggcgagttggcgtgtgcgtgtgtgtgtgtgtgttggtctgagcgcgtcgattgcgttgcggtttgggtttgtgtctgggcgcttagctcaaatggtagagcgcccgcttcgcatgcgggaggtagggggatcgatacccccagtgtccactttttacggcacacaacactttttacgaacaaacactttttaccgcccctcgcgccgctgcttgcttcctagccttcctacccctgctcacccgccacccaagctcacccgccatctgcgagcgtgctggtgcctacgtttacagacgacccaccttttttgtcggcgagtgtggggcaaccacgccgactgccaggcgcaggatcccacaagagtttgggcatgagggagaccggctaaacagctcaccgagagcctggtcagcgccacagaccaaacgcccagctgtgtgctgtgtgctctgtgctctgtgctgtgtgtcacctctgtctgggcgggttcgagtcagccagctgcttgacatttttgttttcggaggcgggtggctcccggcctggcggttcgaggcttcgggtatgtgaggcagtggaccatggcggagcgcggagaatcgacaaggcgtggatgctggcgcctcacgggtgctaatgtgctggtggagaggacgatcgttgtaatgggtgcggaggcttgcttggcgatgtgtggagggatggcgctgtgaggcggttgtgtgtcgttttgtttggtgtgttttgtggcgagttggcgtgtgcgtgtgtgtgtgtgtgttggtctgagcgcgtcgattgcgttgcggtttgggtttgtgtctgggcgcttagctcaaatggtagagcgcccgcttcgcatgcgggaggtagggggatcgatacccccagtgtccactttttacggcacacaacactttttacgaacaaacactttttaccgcccctcgcgccgctgcttgcttcctagccttcctacccctgctcacccgccacccacagctcacccgccatctgcgagcgtgctggtgcctacgtttacagacgacccaccttttttgtcggcgagtgtggggcaaccacgccgactgccaggcgcaggatcccacaagagtttgggcatgagggagaccggctaaacagctcaccgagagcctggtcagcgccacagaccaaacgcccagctgtgtgctgtgtgctctgtgctctgtgctgtgtgtcacctctgtccgggccactggccggtcggacgagtagggttcgagtcagccagctgcttgacatttttgttttcggaggcgggtggctcccggcctggcggttcgaggcttcgggtatgtgaggcagtggaccatggcggagcgcggagaatcgacaaggcgtggatgctggcgcctcacgggtgctaatgtgctggtggagaggacgatcgttgtaatgggtgcggaggcttgcttggcgatgtgtggagggatggcgctgtgaggcggttgtgcgtcgttttgtttggtgtgttttgtggcgagttggcgtgtgcgtgtgtgtgtgttggtctgagcgcgtcgattgcgttgcggtttgggtttgtgtctgggcgcttagctcaaatggtagagcgcccgcttcgcatgcgggaggtagggggatcgatacccccagtgtccactttttacggcacacaacactttttacgaacaaacactttttaccgcccctcgcgccgctgcttgcttcctagccttcctacccctgctcacccgccacccacagctcacccgccatctgcgagcgtgctggtgcctacgtttacagacgacccaccttttttgtcggcgagtgtggggcaaccacgccgactgccaggcgcaggatcccacaagagtttgggcatgagggagaccggctaaacagctcaccgagagcctggtcagcgccacagaccaaacgcccagctttgtgctgtgtgctctgtgctctgtgctgtgtgtcacctctgtccgggccactggccggtcggacgagtagggttcgagtcagccagctgcttgacatttttgttttcggaggcgggtggctcccggcctggcggttcgaggcttcgggtatgtgaggcagtggaccatggcggagcgcggagaatcgacaaggcgtggatgctggcgcctcacgggtgctaatgtgctggtggagaggacgatcgttgtaatgggtgcggaggcttgcttggcgatgtgtggagggatggcgctgtgaggcggttgtgtgtcgttttgtttggtgtgttttgtggcgagttggcgtgtgcgtgtgtgtgtgtgtgtgttggtctgagcgcgtcgattgcgttgcggtttgggtttgtgtctgggcgcttagctcaaatggtagagcgcccgcttcgcatgcgggaggtagggggatcgatacccccagtgtccactttttacggcacacaacactttttacgaacaaacactttttaccgcccctcgcgccgctgcttgcttcctagccttcctacccctgctcacccgccacccacagctcacccgccatctgcgagcgtgctggtgcctacgtttacagacgacccaccttttttgtcggcgagtgtggggcaaccacgccgactgccaggcgcaggatcccacaagagtttgggtatgagggagaccggctaaacagctcaccgagagcctggtcagcgccacagaccaaacgcccagctttgtgctgtgtgctctgtgctctgtgctgtgtgtcacctctgtccgggccactggccggtcggacgagtagggttcgagtcagccagctgcttgacatttttgttttcggaggcgggtggctcccggcctggcggttcgaggcttcgggtatgtgaggcagtggaccatggcggagcgcggagaatcgacaaggcgtggatgctggcgcctcacgggtgctaatgtgctggtggagaggacgatcgttgtaatgggtgcggaggcttgcttggcgatgtgtggagggatggcgctgtgaggcggttgtgcgtcgttttgtttggtgtgttttgtggcgagttggcgtgtgcgtgtgtgtgtgttggtctgagcgcgtcgattgcgttgcggtttgggtttgtgtctgggcgcttagctcaaatggtagagcgcccgcttcgcatgcgggaggcagggggatcgatacccccagtgtccactttttacggcacacaacactttttacgaacaaacactttttaccgcccctcgcgccgctgcttgcttcctagccttcctacccctgctcacccgccacccacagctcacccgccatctgcgagcgtgctggtgcctacgtttacagacgacccaccttttttgtcggcgagtgtggggcaaccacgccgactgccaggcgcaggatcccacaagagtttgggcatgagggagaccggctaaacagctcaccgagagcctggtcagcgccacagaccaaacgcccagctgtgtgctgtgtgctctgtgctctgtgctgtgtgtcacctctgtccgggccactggccggtcggacgagtagggttcgagtcagccagctgcttgacatttttgttttcggaggcgggtggctcccggcctggcggttcgaggcttcgggtatgtgaggcagtggaccatggcggagcgcggagaatcgacaaggcgtggatgctggcgcctcacgggtgctaatgtgctggtggagaggacgatcgttgtaatgggtgcggaggcttgcttggcgatgtgtggagggatggcgctgtgaggcggttgtgtgtcgttttgtttggtgtgttttgtggcgagttggcgtgtgcgtgtgtgtgtgtgtgtgttggtctgagcgcgtcgattgcgttgcggtttgggtttgtgtctgggcgcttagctcaaatggtagagcgcccgcttcgcatgcgggaggtagggggatcgatacccccagtgtccactttttacggcacacaacactttttacgaacaaacactttttaccgcccctcgcgccgctgcttgcttcctagccttcctacccctgctcacccgccacccacagctcacccgccatctgcgagcgtgctggtgcctacgtttacagacgacccaccttttttgtcggcgagtgtggggcaaccacgccgactgccaggcgcaggatcccacaagagtttgggcatgagggagaccggctaaacagctcaccgagagcctggtcagcgccacagaccaaacgcccagctttgtgctgtgtgctctgtgctgtgtgctgtgtgtcacctctgtccgggccactggccggtcggacgagtagggttcgagtcagccagctgcttgacatttttgttttcggaggcgggtggctcccggcctggcggttcgaggcttcgggtatgtgaggcagtggaccatggcggagcgcggagaatcgacaaggcgtggatgctggcgcctcacgggtgctaatgtgctggtggagaggacgatcgttgtaatgggtgcggaggcttgcttggcgatgtgtggagggatggcgctgtgaggcggttgtgcgtcgttttgtttggtgtgttttgtggcgagttggcgtgtgcgtgtgtgtgtgtgtgtgtgttggtctgagcgcgtcgattgcgttgcggtttgggtttgtgtctgggcgcttagctcaaatggtagagcgcccgcttcgcatgcgggaggcagggggatcgatacccccagtgtccacttttacggcacgcaacactttttacgaacaaacactttttaccgcccctcgcgccgctgcttgcttcctagccttcctacccctgctcacccgccacccacagctcacccgccatctgcgagcgtacgtttacagacgacccaccttttttgtcggcgagtgtggggcaaccacgccgactgccaggcgcaggatcccacaagagtttgggcatgagggagaccggctaaacagctcaccgagagcctggtcagcgccacagaccaaacgcccagctgtgtgctgtgtgctctgtgctctgtgctgtgtgtcacctctgtccgggccactggccggtcggacgagtagggttcgagtcagccagctgcttgacatttttgttttcggaggcgggtggctcccggcctggcggttcgaggcttcgggtatgtgaggcagtggaccatggcggagcgcggagaatcgacaaggcgtggatgctggcgcctcacgggtgctaatgtgctggtggagaggacgatcgttgtaatgggtgcggaggcttgcttggcgatgtgtggagggatggcgctgtgaggcggttgtgtgtggttttgtttggtgtgttttgtggcgagttggcgtgtgcgtgtgtgtgtgtgtgtgtgtgtgtgtgttggtctgagcgcgtcgattgcgttgcggtttgggtttgtgtctgggcgcttagctcaaatggtagagcgcccgcttcgcatgcgggaggtagggggatcgatacccccagtgtccactttttacggcacacaacactttttacgaacaaacactttttaccgcccctcgcgccgctgcttgcttcctagccttcctacccctgctcacccgccacccacagctcacccgccatctgcgagcgtgctggtgcctacgtttacagacgacccaccttttttgtcggcgagtgtggggcaaccacgccgactgccaggcgcaggatcccacaagagtttgggcatgagggagaccggctaaacagctcaccgagagcctggtcagcgccacagaccaaacgcccagctgtgtgctgtgtgctctgtgctctgtgctgtgtgtcacctctgtccgggccactggccggtcggacgagtagggttcgagtcagccagctgcttgacatttttgttttcggaggcgggtggctcccggcctggcggttcgaggcttcgggtatgtgaggcagtggaccatggcggagcgcggagaatcgacaaggcgtggatgctggcgcctcacgggtgctaatgtgctggtggagaggacgatcgttgtaatgggtgcggaggcttgcttggcgatgtgtggagggatggcgctgtgaggcggttgtgcgtcgttttgtttggtgtgttttgtggcgagttggcgtgtgcgtgtgtgtgtgtgtgttggtctgagcgcgtcgattgcgttgcggtttgggtttgtgtctgggcgcttagctcaaatggtagagcgcccgcttcgcatgcgggaggtagggggatcgatacccccagtgtccactttttacggcacacaacactttttacgaacaaacactttttaccgcccctcgcgccgctgcttgcttcctagccttcctacccctgctcacccgccacccaagctcacccgccatctgcgagcgtgctggtgcctacgtttacagacgacccaccttttttgtcggcgagtgtggggcaaccacgccgactgccaggcgcaggatcccacaagagtttgggcatgagggagaccggctaaacagctcaccgagagcctggtcagcgccacagaccaaacgcccagctttgtgctgtgtgctctgtgctctgtgctgtgtgtcacctctgtccgggccactggccggtcggacgagtagggttcgagtcagccagctgcttgacatttttgttttcggaggcgggtggctcccggcctggcggttcgaggcttcgggtatgtgaggcagtggaccatggcggagcgcggagaatcgacaaggcgtggatgctggcgcctcacgggtgctaatgtgctggtggagaggacgatcgttgtaatgggtgcggaggcttgcttggcgatgtgtggagggatggcgctgtgaggcggttgtgtgtggttttgtttggtgtgttttgtggcgagttggcgtgtgtgtgtgtgtgtgtgtgttggtctgagcgcgtcgattgcgttgcggtttgggtttgtgtctgggcgcttagctcaaatggtagagcgcccgcttcgcatgcgggaggtagggggatcgatacccccagtgtccactttttacggcacacaacactttttacgaacaaacactttttaccgcccctcgcgccgctgcttgcttcctagccttcctacccctgctcacccgccacccacagctcacccgccatctgcgagcgtgctggtgcctacgtttacagacgacccaccttttttgtcggcgagtgtggggcaaccacgccgactgccaggcgcaggatcccacaagagtttgggcatgagggagaccggctaaacagctcaccgagagcctggtcagcgccacagaccaaacgcccagctgtgtgctgtgtgctctgtgctgtgtgtcacctctgtccgggccactggccggtcggacgagtagggttcgagtcagccagctgcttgacatttttgtttcggaggcgggtggctcccggcctggcggttcgaggcttcgggtatgtgaggcagtggaccatggcggagcgcggagaatcgacaaggcgtggatgctggcgcctcacgggtgctaatgtgctggtggagaggacgatcgttgtaatgggtgcggaggcttgcttggcgatgtgtggagggatggcgctgtgaggcggttgtgtgtggttttgtttggtgtgttttgtggcgagttggcgtgtgcgtgtgtgtgtgtgtgtgtgttggtctgagcgcgtcgattgcgttgcggtttgggtttgtgtctgggcgcttagctcaaatggtagagcgcccgcttcgcatgcgggaggtagggggatcgatacccccagtgtccactttttacggcacacaacactttttacgaacaaacactttttaccgcccctcgcgccgctgcttgcttcctagccttcctacccctgctcacccgccacccacagctcacccgccatctgcgagcgtgctggtgcctacgtttacagacgacccaccttttttgtcggcgagtgtggggcaaccacgccgactgccaggcgcaggatcccacaagagtttgggcatgagggagaccggctaaacagctcaccgagagcctggtcagcgccacagaccaaacgcccagctgtgtgctgtgtgctctgtgctgtgtgtcacctctgtccgggccactggccggtcggacgagtagggttcgagtcagccagctgcttgacatttttgtttcggaggcgggtggctcccggcctggcggttcgaggcttcgggtatgtgaggcagtggaccatggcggagcgcggagaatcgacaaggcgtggatgctggcgcctcacgggtgctaatgtgctggtggagaggacgatcgttgtaatgggtgcggaggcttgcttggcgatgtgtggagggatggcgctgtgaggcggttgtgtgtggttttgtttggtgtgttttgtggcgagttggcgtgtgcgtgtgtgtgtgtgtgttggtctgagcgcgtcgattgcgttgcggtttgggtttgtgtctgggcgcttagctcaaatggtagagcgcccgcttcgcatgcgggaggtagggggatcgatacccccagtgtccactttttacggcacacaacactttttacgaacaaacactttttaccgcccctcgcgccgctgcttgcttcctagccttcctacccctgctcacccgccacccacagctcacccgccatctgcgagcgtgctggtgcctacgtttacagacgacccaccttttttgtcggcgagtgtggggcaaccacgccgactgccaggcgcaggatcccacaagagtttgggcatgagggagaccggctaaacagctcaccgagagcctggtcagcgccacagaccaaacgcccagctgtgtgctgtgtgctctgtgctctgtgctgtgtgtcacctctgtccgggccactggccggtcggacgagtagggttcgagtcagccagctgcttgacatttttgttttcggaggcgggtggctcccggcctggcggttcgaggcttcgggtatgtgaggcagtggaccatggcggagcgcggagaatcgacaaggcgtggatgctggcgcctcacgggtgctaatgtgctggtggagaggacgatcgttgtaatgggtgcggaggcttgcttggcgatgtgtggagggatggcgctgtgaggcggttgtgcgtcgttttgtttggtgtgttttgtggcgagttggcgtgtgcgtgtgtgtgtgtgtgtgttggtctgagcgcgtcgattgcgttgcggtttgggtttgtgtctgggcgcttagctcaaatggtagagcgcccgcttcgcatgcgggaggtagggggatcgatacccccagtgtccactttttacggcacacaacactttttacgaacaaacactttttaccgcccctcgcgccgctgcttgcttcctagccttcctacccctgctcacccgccacccaagctcacccgccatctgcgagcgtgctggtgcctacgtttacagacgacccaccttttttgtcggcgagtgtggggcaaccacgccgactgccaggcgcaggatcccacaagagtttgggcatgagggagaccggctaaacagctcaccgagagcctggtcagcgccacagaccaaacgcccagctgtgtgctgtgtgctctgtgctgtgtgtcacctctgtccgggccactggccggtcggacgagtagggttcgagtcagccagctgcttgacatttttgtttcggaggcgggtggctcccggcctggcggttcgaggcttcgggtatgtgaggcagtggaccatggcggagcgcggagaatcgacaaggcgtggatgctggcgcctcacgggtgctaatgtgctggtggagaggacgatcgttgtaatgggtgcggaggcttgcttggcgatgtgtggagggatggcgctgtgaggcggttgtgtgtcgttttgtttggtgtgttttgtggcgagttggcgtgtgcgtgtgtgtgtgtgtgttggtctgagcgcgtcgattgcgttgcggtttgggtttgtgtctgggcgcttagctcaaatggtagagcgcccgcttcgcatgcgggaggtagggggatcgatacccccagtgtccactttttacggcacacaacactttttacgaacaaacactttttaccgcccctcgcgccgctgcttgcttcctagccttcctacccctgctcacccgccacccacagctcacccgccatctgcgagcgtgctggtgcctacgtttacagacgacccaccttttttgtcggcgagtgtggggcaaccacgccgactgccaggcgcaggatcccacaagagtttgggcatgagggagaccggctaaacagctcaccgagagcctggtcagcgccacagaccaaacgcccagctgtgtgctgtgtgctctgtgctgtgtgtcacctctgtccgggccactggccggtcggacgagtagggttcgagtcagccagctgcttgacatttttgttttcggaggcgggtggctcccggcctggcggttcgaggcttcgggtatgtgaggcagtggaccatggcggagcgcggagaatcgacaaggcgtggatgctggcgcctcacgggtgctaatgtgctggtggagaggacgatcgttgtaatgggtgcggaggcttgcttggcgatgtgtggagggatggcgctgtgaggcggttgtgtgtggttttgtttggtgtgttttgtggcgagttggcgtgtgcgtgtgtgtgtgtgtgtgttggtctgagcgcgtcgattgcgttgcggtttgggtttgtgtctgggcgcttagctcaaatggtagagcgcccgcttcgcatgcgggaggtagggggatcgatacccccagtgtccactttttacggcacacaacactttttacgaacaaacactttttaccgcccctcgcgccgctgcttgcttcctagccttcctacccctgctcacccgccacccaagctcacccgccatctgcgagcgtgctggtgcctacgtttacagacgacccaccttttttgtcggcgagtgtggggcaaccacgccgactgccaggcgcaggatcccacaagagtttgggcatgagggagaccggctaaacagctcaccgagagcctggtcagcgccacagaccaaacgcccagctgtgtgctgtgtgctctgtgctctgtgctgtgtgtcacctctgtccgggccactggccggtcggacgagtagggttcgagtcagccagctgcttgacatttttgttttcggaggcgggtagctcccggcctggcggttcgaggcttcgggtatgtgaggcagtggaccatggcggagcgcggagaatcgacaaggcgtggatgctggcgcctcacgggtgctaatgtgctggtggagaggacgatcgttgtaatgggtgcggaggcttgcttggcgatgtgtggagggatggcgctgtgaggcggttgtgtgtggttttgtttggtgtgttttgtggcgagttggcgtgtgtgtgtgtgtgtgtgtgttggtctgagcgcgtcgattgcgttgcggtttgggtttgtgtctgggcgcttagctcaaatggtagagcgcccgcttcgcatgcgggaggtagggggatcgatacccccagtgtccactttttacggcacacaacactttttacgaacaaacactttttaccgcccctcgcgccgctgcttgcttcctagccttcctacccctgctcacccgccacccacagctcacccgccatctgcgagcgtgctggtgcctacgtttacagacgacccaccttttttgtcggcgagtgtggggcaaccacgccgactgccaggcgcaggatcccacaagagtttgggcatgagggagaccggctaaacagctcaccgagagcctggtcagcgccacagaccaaacgcccagctgtgtgctgtgtgctctgtgctctgtgctgtgtgtcacctctgtccgggccactggccggtcggacgagtagggttcgagtcagccagctgcttgacatttttgttttcggaggcgggtggctcccggcctggcggttcgaggcttcgggtatgtgaggcagtggaccatggcggagcgcggagaatcgacaaggcgtggatgctggcgcctcacgggtgctaatgtgctggtggagaggacgatcgttgtaatgggtgcggaggcttgcttggcgatgtgtggagggatggcgctgtgaggcggttgtgtgtggttttgtttggtgtgttttgtggcgagttggcgtgtgcgtgtgtgtgtgtgtgtgtgttggtctgagcgcgtcgattgcgttgcggtttgggtttgtgtctgggcgcttagctcaaatggtagagcgcccgcttcgcatgcgggaggtagggggatcgatacccccagtgtccactttttacggcacacaacactttttacgaacaaacactttttaccgcccctcgcgccgctgcttgcttcctagccttcctacccctgctcacccgccacccaagctcacccgccatctgcgagcgtgctggtgcctacgtttacagacgacccaccttttttgtcggcgagtgtggggcaaccacgccgactgccaggcgcaggatcccacaagagtttgggcatgagggagaccggctaaacagctcaccgagagcctggtcagcgccacagaccaaacgcccagctttgtgctgtgtgctctgtgctctgtgctgtgtgtcacctctgtccgggccactggccggtcggacgagtagggttcgagtcagccagctgcttgacatttttgttttcggaggcgggtggctcccggcctggcggttcgaggcttcgggtatgtgaggcagtggaccatggcggagcgcggagaatcgacaaggcgtggatgctggcgcctcacgggtgctaatgtgctggtggagaggacgatcgttgtaatgggtgcggaggcttgcttggcgatgtgtggagggatggcgctgtgaggcggttgtgtgtggttttgtttggtgtgttttgtggcgagttggcgtgtgcgtgtgtgtgtgtgtgtgtgttggtctgagcgcgtcgattgcgttgcggtttgggtttgtgtctgggcgcttagctcaaatggtagagcgcccgcttcgcatgcgggaggtagggggatcgatacccccagtgtccactttttacggcacacaacactttttacgaacaaacactttttaccgcccctcgcgccgctgcttgcttcctagccttcctacccctgctcacccgccacccacagctcacccgccatctgcgagcgtgctggtgcctacgtttacagacgacccaccttttttgtcggcgagtgtggggcaaccacgccgactgccaggcgcaggatcccacaagagtttgggcatgagggagaccggctaaacagctcaccgagagcctggtcagcgccacagaccaaacgcccagctttgtgctgtgtgctctgtgctctgtgctgtgtgtcacctctgtccgggccactggccggtcggacgagtagggttcgagtcagccagctgcttgacatttttgttttcggaggcgggtggctcccggcctggcggttcgaggcttcgggtatgtgaggcagtggaccatggcggagcgcggagaatcgacaaggcgtggatgctggcgcctcacgggtgctaatgtgctggtggagaggacgatcgttgtaatgggtgcggaggcttgcttggcgatgtgtggagggatggcgctgtgaggcggttgtgtgtggttttgtttggtgtgttttgtggcgagttggcgtgtgcgtgtgtgtgtgtgtgttggtctgagcgcgtcgattgcgttgcggtttgggtttgtgtctgggcgcttagctcaaatggtagagcgcccgcttcgcatgcgggaggtagggggatcgatacccccagtgtccactttttacggcacacaacactttttacgaacaaacactttttaccgcccctcgcgccgctgcttgcttcctagccttcctacccctgctcacccgccacccaagctcacccgccatctgcgagcgtgctggtgcctacgtttacagacgacccaccttttttgtcggcgagtgtggggcaaccacgccgactgccaggcgcaggatcccacaagagtttgggcatgagggagaccggctaaacagctcaccgagagcctggtcagcgccacagaccaaacgcccagctgtgtgctgtgtgctctgtgctctgtgctgtgtgtcacctctgtctgggcgggttcgagtcagccagctgcttgacatttttgttttcggaggcgggtggctcccggcctggcggttcgaggcttcgggtatgtgaggcagtggaccatggcggagcgcggagaatcgacaaggcgtggatgctggcgcctcacgggtgctaatgtgctggtggagaggacgatcgttgtaatgggtgcggaggcttgcttggcgatgtgtggagggatggcgctgtgaggcggttgtgtgtggttttgtttggtgtgttttgtggcgagttggcgtgtgcgtgtgtgtgtgtgtgtgtgttggtctgagcgcgtcgattgcgttgcggtttgggtttgtgtctgggcgcttagctcaaatggtagagcgcccgcttcgcatgcgggaggtagggggatcgatacccccagtgtccactttttacggcacacaacactttttacgaacaaacactttttaccgcccctcgcgccgctgcttgcttcctagccttcctacccctgctcacccgccacccaagctcacccgccatctgcgagcgtgctggtgcctacgtttacagacgacccaccttttttgtcggcgagtgtggggcaaccacgccgactgccaggcgcaggatcccacaagagtttgggcatgagggagaccggctaaacagctcaccgagagcctggtcagcgccacagaccaaacgcccagctgtgtgctgtgtgctctgtgctctgtgctgtgtgtcacctctgtccgggccactggccggtcggacgagtagggttcgagtcagccagctgcttgacatttttgttttcggaggcgggtggctcccggcctggcggttcgaggcttcgggtatgtgaggcagtggaccatggcggagcgcggagaatcgacaaggcgtggatgctggcgcctcacgggtgctaatgtgctggtggagaggacgatcgttgtaatgggtgcggaggcttgcttggcgatgtgtggagggatggcgctgtgaggcggttgtgtgtcgttttgtttggtgtgttttgtggcgagttggcgtgtgcgtgtgtgtgtgtgtgtgttggtctgagcgcgtcgattgcgttgcggtttgggtttgtgtctgggcgcttagctcaaatggtagagcgcccgcttcgcatgcgggaggtagggggatcgatacccccagtgtccactttttacggcacacaacactttttacgaacaaacactttttaccgcccctcgcgccgctgcttgcttcctagccttcctacccctgctcacccgccacccacagctcacccgccatctgcgagcgtgctggtgcctacgtttacagacgacccaccttttttgtcggcgagtgtggggcaaccacgccgactgccaggcgcaggatcccacaagagtttgggcatgagggagaccggctaaacagctcaccgagagcctggtcagcgccacagaccaaacgcccagctgtgtgctgtgtgctgtgtgctctgtgctgtgtgtcacctctgtccgggccactggccggtcggacgagtagggttcgagtcagccagctgcttgacatttttgttttcggaggcgggtggctcccggcctggcggttcgaggcttcgggtatgtgaggcagtggaccatggcggagcgcggagaatcgacaaggcgtggatgctggcgcctcacgggtgctaatgtgctggtggagaggacgatcgttgtaatgggtgcggaggcttgcttggcgatgtgtggagggatggcgctgtgaggcggttgtgtgtggttttgtttggtgtgttttgtggcgagttggcgtgtgcgtgtgtgtgtgtgtgtgtgtgttggtctgagcgcgtcgattgcgttgcggtttgggtttgtgtctgggcgcttagctcaaatggtagagcgcccgcttcgcatgcgggaggtagggggatcgatacccccagtgtccacttttacggcacacaacactttttacgaacaaacactttttaccgcccctcgcgccgctgcttgcttcctagccttcctacccctgctcacccgccacccacagctcacccgccatctgcgagcgtgctggtgcctacgtttacagacgacccaccttttttgtcggcgagtgtggggcaaccacgccgactgccaggcgcaggatcccacaagagtttgggcatgagggagaccggctaaacagctcaccgagagcctggtcagcgccacagaccaaacgcccagctgtgtgctgtgtgctctgtgctctgtgctgtgtgtcacctctgtccgggcgggttcgagtcagccagctgcttgacatttttgttttcggaggcgggtggctcccggcctggcggttcgaggcttcgggtatgtgaggcagtggaccatggcggagcgcggagaatcgacaaggcgtggatgctggcgcctcacgggtgctaatgtgctggtggagaggacgatcgttgtaatgggtgcggaggcttgcttggcgatgtgtggagggatggcgctgtgaggcggttgtgcgtcgttttgtttggtgtgttttgtggcgagttggcgtgtgcgtgtgtgtgttgatctgagcgcgtcgattgcgttgcggcttgggtttgcgtctgggcgcttagctcaaatggtagagcgcccgcttcgcatgcgggaggtagggggatcgatacccccagtgtccacttttacggcacacaacactttttacgaacaaacactttttaccgcccctcgcgccgctgcttgcttcctagccttcctacccctgctcacccgccacccacagctcacccgccatctgcgagcgtgctggtgcctacgtttacagacgacccaccttttttgtcggcgagtgtggggcaaccacgccgactgccaggcgcaggatcccacaagagtttgggcatgagggagaccggctaaacagctcaccgagagcctggtcagcgccacagaccaaacgcccagctgtgtgctctgtgctctgtgctgtgtgtcacctctgtccgggccactggccggtcggacgagtagggttcgagtcagccagctgcttgacatttttgttttcggaggcgggtggctcccggcctggcggttcgaggcttcgggtatgtgaggcagtggaccatggcggagcgcggagaatcgacaaggcgtggatgctggcgcctcacgggtgctaatgtgctggtggagaggacgatcgttgtaatgggtgcggaggcttgcttggcgatgtgtggagggatggcgctgtgaggcggttgtgtgtggttttgtttggtgtgttttgtggcgagttggcgtgtgcgtgtgtgtgtctgtgtgttggtctgagcgcgtcgattgcgttgcggtttgggtttgtgtctgggcgcttagctcaaatggtagagcgcccgcttcgcatgcgggaggtagggggatcgatacccccagtgtccactttttacggcacacaacactttttannnnnnnnnnnnnnnnnnnnnnnnnnnnnnnnnnnnnnnnnnnnnnnnnnnnnnnnnnnnnnnnnnnnnnnnnnnnnnnnnnnnnnnnnnnnnnnnnnnnagcgcgtcgattgcgttgcggtttgggtttgtgtctgggcgcttagctcaaatggtagagcgcccgcttcgcatgcgggaggtagggggatcgatacccccagtctccactttttacggcacacaacactttttacgaacaaacactttttaccgcccctcgcgccgctgcttgcttcctagccttcctacccctgctcacccgccacccacagctcacccgccatctgcgagcgtgctggtgcctacgtttacagacgacccaccttttttgtcggcgagtgtggggcaaccacgccgactgccaggcgcaggatcccacaagagtttgggcatgagggagaccggctaaacagctcaccgagagcctggtcagcgccacagaccaaacgcccagctgtgtgctgtgtgctctgtgctctgtgctgtgtgtcacctctgtccgggccactggccggtcggacgagtagggttcgagtcagccagctgcttgacatttttgttttcggaggcgggtggctcccggcctggcggttcgaggcttcgggtatgtgaggcagtggaccatggcggagcgcggagaatcgacaaggcgtggatgctggcgcctcacgggtgctaatgtgctggtggagaggacgatcgttgtaatgggtgcggaggcttgcttggcgatgtgtggagggatggcgctgtgaggcggttgtgtgtggttttgtttggtgtgttttgtggcgagttggcgtgtgcgtgtgtgtgtgtgtgtgttggtctgagcgcgtcgattgcgttgcggtttgggtttgtgtctgggcgcttagctcaaatggtagagcgcccgcttcgcatgcgggaggtagggggatcgatacccccagtgtccactttttacggcacacaacactttttacgaacaaacactttttaccgcccctcgcgccgctgcttgcttcctagccttcctacccctgctcacccgccacccaagctcacccgccatctgcgagcgtgctggtgcctacgtttacagacgacccaccttttttgtcggcgagtgtggggcaaccacgccgactgccaggcgcaggatcccacaagagtttgggcatgagggagaccggctaaacagctcaccgagagcctggtcagcgccacagaccaaacgcccagctttgtgctgtgtgctctgtgctctgtgctgtgtgtcacctctgtccgggccactggccggtcggacgagtagggttcgagtcagccagctgcttgacatttttgttttcggaggcgggtggctcccggcctggcggttcgaggcttcgggtatgtgaggcagtggaccatggcggagcgcggagaatcgacaaggcgtggatgctggcgcctcacgggtgctaatgtgctggtggagaggacgatcgttgtaatgggtgcggaggcttgcttggcgatgtgtggagggatggcgctgtgaggcggttgtgtgtcgttttgtttggtgtgttttgtggcgagttggcgtgtgcgtgtgtgtgtgtgtgtgttggtctgagcgcgtcgattgcgttgcggtttgggtttgtgtctgggcgcttagctcaaatggtagagcgcccgcttcgcatgcgggaggtagggggatcgatacccccagtgtccactttttacggcacacaacactttttacgaacaaacactttttaccgcccctcgcgccgctgcttgcttcctagccttcctacccctgctcacccgccacccaagctcacccgccatctgcgagcgtgctggtgcctacgtttacagacgacccaccttttttgtcggcgagtgtggggcaaccacgccgactgccaggcgcaggatcccacaagagtttgggcatgagggagaccggctaaacagctcaccgagagcctggtcagcgccacagaccaaacgcccagctttgtgctgtgtgctctgtgctctgtgctgtgtgtcacctctgtccgggccactggccggtcggacgagtagggttcgagtcagccagctgcttgacatttttgttttcggaggcgggtggctcccggcctggcggttcgaggcttcgggtatgtgaggcagtggaccatggcggagcgcggagaatcgacaaggcgtggatgctggcgcctcacgggtgctaatgtgctggtggagaggacgatcgttgtaatgggtgcggaggcttgcttggcgatgtgtggagggatggcgctgtgaggcggttgtgtgtggttttgtttggtgtgttttgtggcgagttggcgtgtgtgtgtgtgtgtgtgtgttggtctgagcgcgtcgattgcgttgcggtttgggtttgtgtctgggcgcttagctcaaatggtagagcgcccgcttcgcatgcgggaggtagggggatcgatacccccagtgtccactttttacggcacacaacactttttacgaacaaacactttttaccgcccctcgcgccgctgcttgcttcctagccttcctacccctgctcacccgccacccacagctcacccgccatctgcgagcgtgctggtgcctacgtttacagacgacccaccttttttgtcggcgagtgtggggcaaccacgccgactgccaggcgcaggatcccacaagagtttgggcatgagggagaccggctaaacagctcaccgagagcctggtcagcgccacagaccaaacgcccagctgtgtgctgtgtgctctgtgctctgtgctgtgtgtcacctctgtccgggccactggccggtcggacgagtagggttcgagtcagccagctgcttgacatttttgtttcggaggcgggtggctcccggcctggcggttcgaggcttcgggtatgtgaggcagtggaccatggcggagcgcggagaatcgacaaggcgtggatgctggcgcctcacgggtgctaatgtgctggtggagaggacgatcgttgtaatgggtgcggaggcttgcttggcgatgtgtggagggatggcgctgtgaggcggttgtgcgtcgttttgtttggtgtgttttgtggcgagttggcgtgtgcgtgtgtgtgtgtgtgttggtctgagcgcgtcgattgcgttgcggtttgggtttgtgtctgggcgcttagctcaaatggtagagcgcccgcttcgcatgcgggaggtagggggatcgatacccccagtgtccactttttacggcacacaacactttttacgaacaaacactttttaccgcccctcgcgccgctgcttgcttcctagccttcctacccctgctcacccgccacccaagctcacccgccatctgcgagcgtgctggtgcctacgtttacagacgacccaccttttttgtcggcgagtgtggggcaaccacgccgactgccaggcgcaggatcccacaagagtttgggcatgagggagaccggctaaacagctcaccgagagcctggtcagcgccacagaccaaacgcccagctttgtgctgtgtgctctgtgctctgtgctgtgtgtcacctctgtccgggccactggccggtcggacgagtagggttcgagtcagccagctgcttgacatttttgttttcggaggcgggtggctcccggcctggcggttcgaggcttcgggtatgtgaggcagtggaccatggcggagcgcggagaatcgacaaggcgtggatgctggcgcctcacgggtgctaatgtgctggtggagaggacgatcgttgtaatgggtgcggaggcttgcttggcgatgtgtggagggatggcgctgtgaggcggttgtgcgtcgttttgtttggtgtgttttgtggcgagttggcgtgtgcgtgtgtgtgtgtgtgtgttggtctgagcgcgtcgattgcgttgcggtttgggtttgtgtctgggcgcttagctcaaatggtagagcgcccgcttcgcatgcgggaggtagggggatcgatacccccagtgtccactttttacggcacacaacactttttacgaacaaacactttttaccgcccctcgcgccgctgcttgcttcctagccttcctacccctgctcacccgccacccaagctcacccgccatctgcgagcgtgctggtgcctacgtttacagacgacccaccttttttgtcggcgagtgtggggcaaccacgccgactgccaggcgcaggatcccacaagagtttgggcatgagggagaccggctaaacagctcaccgagagcctggtcagcgccacagaccaaacgcccagctttgtgctgtgtgctctgtgctctgtgctgtgtgtcacctctgtccgggccactggccggtcggacgagtagggttcgagtcagccagctgcttgacatttttgttttcggaggcgggtggctcccggcctggcggttcgaggcttcgggtatgtgaggcagtggaccatggcggagcgcggagaatcgacaaggcgtggatgctggcgcctcacgggtgctaatgtgctggtggagaggacgatcgttgtaatgggtgcggaggcttgcttggcgatgtgtggagggatggcgctgtgaggcggttgtgtgtggttttgtttggtgtgttttgtggcgagttggcgtgtgcgtgtgtgtgtgtgtgttggtctgagcgcgtcgattgcgttgcggtttgggtttgtgtctgggcgcttagctcaaatggtagagcgcccgcttcgcatgcgggaggtagggggatcgatacccccagtgtccactttttacggcacacaacactttttacgaacaaacactttttaccgcccctcgcgccgctgcttgcttcctagccttcctacccctgctcacccgccacccaagctcacccgccatctgcgagcgtgctggtgcctacgtttacagacgacccaccttttttgtcggcgagtgtggggcaaccacgccgactgccaggcgcaggatcccacaagagtttgggcatgagggagaccggctaaacagctcaccgagagcctggtcagcgccacagaccaaacgcccagctgtgtgctgtgtgctctgtgctgtgtgtcacctctgtccgggccactggccggtcggacgagtagggttcgagtcagccagctgcttgacatttttgttttcggaggcgggtggctcccggcctggcggttcgaggcttcgggtatgtgaggcagtggaccatggcggagcgcggagaatcgacaaggcgtggatgctggcgcctcacgggtgctaatgtgctggtggagaggacgatcgttgtaatgggtgcggaggcttgcttggcgatgtgtggagggatggcgctgtgaggcggttgtgcgtcgtttcgtttggtgtgttttgtggcgagttggcgtgtgcgtgtgtgtgtgtgtnnnnnnnnnnnnnnnnnnnnnnnnnnnnnnnnnnnnnnnnnnnnnnnnnnnnnnnnnnnnnnnnnnnnnnnnnnnnnnnnnnnnnnnnnnnnnnnnnnnnnnnnnnnnnnnnnnnnnnnnnnnnnnnnnnnnnnnnnnnnnnnnnnnnnnnnnnnnnnnnnnnnnnnnnnnnnnnnnnnnnnnnnnnnnnnnnnnnnnnnnnnnnnnnnnnnnnnnnnnnnnnnnnnnnnnnnnnnnnnnnnnnnnnnnnnnnnnnnnnnnnnnnnnnnnnnnnnnnnnnnnnnnnnnnnnnnnnnnnnnnnnnnnnnnnnnnnnnnnnnnnnnnnnnnnnnnnnnnnnnnnnnnnnnnnnnnnnnnnnnnnnnnnnnnnnnnnnnnnnnnnnnnnnnnnnnnnnnnnnnnnnnnnnnnnnnnnnnnnnnnnnnnnnnnnnnnnnnnnnnnnnnnnnnnnnnnnnnnnnnnnnnnnnnnnnnnnnnnnnnnnnnnnnnnnnnnnnnnnnnnnnnnnnnnnnnnnnnnnnnnnnnnnnnnnnnnnnnnnnnnnnnnnnnnnnnnnnnnnnnnnnnnnnnnnnnnnnnnnnnnnnnnnnnnnnnnnnnnnnnnnnnnnnnnnnnnnnnnnnnnnnnnnnnnnnnnnnnnnnnnnnnnnnnnnnnnnnnnnnnnnnnnnnnnnnnnnnnnnnnnnnnnnnnnnnnnnnnnnnnnnnnnnnnnnnnnnnnnnnnnnnnnnnnnnnnnnnnnnnnnnnnnnnnnnnnnnnnnnnnnnnnnnnnnnnnnnnnnnnnnnnnnnnnnnnnnnnnnnnnnnnnnnnnnnnnnnnnnnnnnnnnnnnnnnnnnnnnnnnnnnnnnnnnnnnnnnnnnnnnnnnnnnnnnnnnnnnnnnnnnnnnnnnnnnnnnnnnnnnnnnnnnnnnnnnnnnnnnnnnnnnnnnnnnnnnnnnnnnnnnnnnnnnnnnnnnnnnnnnnnnnnnnnnnnnnnnnnnnnnnnnnnnnnnnnnnnnnnnnnnnnnnnnnnnnnnnnnnnnnnnnnnnnnnnnnnnnnnnnnnnnnnnnnnnnnnnnnnnnnnnnnnnnnnnnnnnnnnnnnnnnnnnnacaggcccagctgtgtgctgtgtgctgtgtgctctgtgctctgtgctgtgtgtcacctctgtccgggccactggccggtcggacgagtagggttcgagtcagccagctgcttgacatttttgttttcggaggcgggtggctcccggcctggcggttcgaggcttcgggtatgtgaggcagtggaccatggcggagcgcggagaatcgacaaggcgtggatgctggcgcctcacgggtgctaatgtgctggtggagaggacgatcgttgtaatgggtgcggaggcttgcttggcgatgtgtggagggatggcgctgtgaggcggttgtgtgtggttttgtttggtgtgttttgtggcgagttggcgtgtgtgtgtgtgtgtgtgtgttggtctgagcgcgtcgattgcgttgcggtttgggtttgtgtctgggcgcttagctcaaatggtagagcgcccgcttcgcatgcgggaggtagggggatcgatacccccagtgtccactttttacggcacacaacactttttacgaacaaacactttttaccgcccctcgcgccgctgcttgcttcctagccttcctacccctgctcacccgccacccaagctcacccgccatctgcgagcgtgctggtgcctacgtttacagacgacccaccttttttgtcggcgagtgtggggcaaccacgccgactgccaggcgcaggatcccacaagagtttgggcatgagggagaccggctaaacagctcaccgagagcctggtcagcgccacagaccaaacgcccagctttgtgctgtgtgctctgtgctctgtgctgtgtgtcacctctgtccgggccactggccggtcggacgagtagggttcgagtcagccagctgcttgacatttttgttttcggaggcgggtggctcccggcctggcggttcgaggcttcgggtatgtgaggcagtggaccatggcggagcgcggagaatcgacaaggcgtggatgctggcgcctcacgggtgctaatgtgctggtggagaggacgatcgttgtaatgggtgcggaggcttgcttggcgatgtgtggagggatggcgctgtgaggcggttgtgtgtcgttttgtttggtgtgttttgtggcgagttggcgtgtgcgtgtgtgtgtgtgtgttggtctgagcgcgtcgattgcgttgcggtttgggtttgtgtctgggcgcttagctcaaatggtagagcgcccgcttcgcatgcgggaggtagggggatcgatacccccagtgtccactttttacggcacacaacactttttacgaacaaacactttttaccgcccctcgcgccgctgcttgcttcctagccttcctacccctgctcacccgccacccaagctcacccgccatctgcgagcgtgctggtgcctacgtttacagacgacccaccttttttgtcggcgagtgtggggcaaccacgccgactgccaggcgcaggatcccacaagagtttgggcatgagggagaccggctaaacagctcaccgagagcctggtcagcgccacagaccaaacgcccagctttgtgctgtgtgctctgtgctctgtgctgtgtgtcacctctgtccgggccactggccggtcggacgagtagggttcgagtcagccagctgcttgacatttttgttttcggaggcgggtggctcccggcctggcggttcgaggcttcgggtatgtgaggcagtggaccatggcggagcgcggagaatcgacaaggcgtggatgctggcgcctcacgggtgctaatgtgctggtggagaggacgatcgttgtaatgggtgcggaggcttgcttggcgatgtgtggagggatggcgctgtgaggcggttgtgtgtcgttttgtttggtgtgttttgtggcgagttggcgtgtgcgtgtgtgtgtgtgtgtgttggtctgagcgcgtcgattgcgttgcggtttgggtttgtgtctgggcgcttagctcaaatggtagagcgcccgcttcgcatgcgggaggtaggggggtcgatacccccagtgtccactttttacggcacacaacactttttacgaacaaacactttttaccgcccctcgcgccgctgcttgcttcctagccttcctacccctgctcacccgccacccaagctcacccgccatctgcgagcgtgctggtgcctacgtttacagacgacccaccttttttgtcggcgagtgtggggcaaccacgccgactgccaggcgcaggatcccacaagagtttgggcatgagggagaccggctaaacagctcaccgagagcctggtcagcgccacagaccaaacgcccagctgtgtgctgtgtgctctgtgctctgtgctgtgtgtcacctctgtccgggccactggccggtcggacgagtagggttcgagtcagccagctgcttgacatttttgttttcggaggcgggtggctcccggcctggcggttcgaggcttcgggtatgtgaggcagtggaccatggcggagcgcggagaatcgacaaggcgtggatgctggcgcctcacgggtgctaatgtgctggtggagaggacgatcgttgtaatgggtgcggaggcttgcttggcgatgtgtggagggatggcgctgtgaggcggttgtgtgtggttttgtttggtgtgttttgtggcgagttggcgtgtgcgtgtgtgtgtgtgtgtgtgttggtctgagcgcgtcgattgcgttgcggtttgggtttgtgtctgggcgcttagctcaaatggtagagcgcccgcttcgcatgcgggaggtagggggatcgatacccccagtgtccactttttacggcacacaacactttttacgaacaaacactttttaccgcccctcgcgccgctgcttgcttcctagccttcctacccctgctcacccgccacccaagctcacccgccatctgcgagcgtgctggtgcctacgtttacagacgacccaccttttttgtcggcgagtgtggggcaaccacgccgactgccaggcgcaggatcccacaagagtttgggcatgagggagaccggctaaacagctcaccgagagcctggtcagcgccacagaccaaacgcccagctttgtgctgtgtgctctgtgctctgtgctgtgtgtcacctctgtccgggccactggccggtcggacgagtagggttcgagtcagccagctgcttgacatttttgttttcggaggcgggtggctcccggcctggcggttcgaggcttcgggtatgtgaggcagtggaccatggcggagcgcggagaatcgacaaggcgtggatgctggcgcctcacgggtgctaatgtgctggtggagaggacgatcgttgtaatgggtgcggaggcttgcttggcgatgtgtggagggatggcgctgtgaggcggttgtgtgtggttttgtttggtgtgttttgtggcgagttggcgtgtgcgtgtgtgtgtgtgtgtgttggtctgagcgcgtcgattgcgttgcggtttgggtttgtgtctgggcgcttagctcaaatggtagagcgcccgcttcgcatgcgggaggtagggggatcgatacccccagtgtccacttttacggcacacaacactttttacgaacaaacactttttaccgcccctcgcgccgctgcttgcttcctagccttcctacccctgctcacccgccacccaagctcacccgccatctgcgagcgtgctggtgcctacgtttacagacgacccaccttttttgtcggcgagtgtggggcaaccacgccgactgccaggcgcaggatcccacaagagtttgggcatgagggagaccggctaaacagctcaccgagagcctggtcagcgccacagaccaaacgcccagctgtgtgctgtgtgctctgtgctctgtgctgtgtgtcacctctgtccgggccactggccggtcggacgagtagggttcgagtcagccagctgcttgacatttttgttttcggaggcgggtggctcccggcctggcggttcgaggcttcgggtatgtgaggcagtggaccatggcggagcgcggagaatcgacaaggcgtggatgctggcgcctcacgggtgctaatgtgctggtggagaggacgatcgttgtaatgggtgcggaggcttgcttggcgatgtgtggagggatggcgctgtgaggcggttgtgcgtcgttttgtttggtgtgttttgtggcgagttggcgtgtgcgtgcgtgtgtgtgtgttgatctgagcgcgtcgattgcgttgcggtttgggtttgtgtctgggcgcttagctcaaatggtagagcacccgcttcgcatgcggatcgatacccccagtgtccacttttacggcacacaacactttttacgaacaaacactttttaccgcccctcgcgccgctgcttgcttcctagccttcctacccctgctcacccgccacccacagctcacccgccatctgcgagcgtgctggtgcctacgtttacagacgacccaccttttttgtcggcgagtgtggggcaaccacgccgactgccaggcgcaggatcccacaagagtttgggcatgagggagaccggctaaacagctcaccgagagcctggtcagcgccacagaccaaacgcccagctgtgtgctgtgtgctctgtgctctgtgctgtgtgtcacctctgtccgggccactggccggtcggacgagtagggttcgagtcagccagctgcttgacatttttgttttcggaggcgggtagctcccggcctggcggttcgaggcttcgggtatgtgaggcagtggaccatggcggagcgcggagaatcgacaaggcgtggatgctggcgcctcacgggtgctaatgtgctggtggagaggacgatcgttgtaatgggtgcggaggcttgcttggcgatgtgtggagggatggcgctgtgaggcggttgtgtgtggttttgtttggtgtgttttgtggcgagttggcgtgtgcgtgtgtgtgtgtgtgtgtgtgttggtctgagcgcgtcgattgcgttgcggtttgggtttgtgtctgggcgcttagctcaaatggtagagcgcccgcttcgcatgcgggaggtagggggatcgatacccccagtgtccactttttacggcacacaacactttttacgaacaaacactttttaccgcccctcgcgccgctgcttgcttcctagccttcctacccctgctcacccgccacccacagctcacccgccatctgcgagcgtgctggtgcctacgtttacagacgacccaccttttttgtcggcgagtgtggggcaaccacgccgactgccaggcgcaggatcccacaagagtttgggcatgagggagaccggctaaacagctcaccgagagcctggtcagcgccacagaccaaacgcccagctgtgtgctgtgtgctgtgtgctctgtgctgtgtgtcacctctgtccgggccactggccggtcggacgagtagggttcgagtcagccagctgcttgacatttttgttttcggaggcgggtggctcccggcctggcggttcgaggcttcgggtatgtgaggcagtggaccatggcggagcgcggagaatcgacaaggcgtggatgctggcgcctcacgggtgctaatgtgctggtggagaggacgatcgttgtaatgggtgcggaggcttgcttggcgatgtgtggagggatggcgctgtgaggcggttgtgtgtggttttgtttggtgtgttttgtggcgagttggcgtgtgcgtgtgtgtgtgtgtgttggtctgagcgcgtccattgcgttgcggtttgggtttgtgtctgggcgcttagctcaaatggtagagcgcccgcttcgcatgcgggaggtagggggatcgatacccccagtgtccactttttacggcacacaacactttttacgaacaaacactttttaccgcccctcgcgccgctgcttgcttcctagccttcctacccctgctcacccgccacccacagatcacccgccatctgcgagcgtgctggtgcctacgtttacagacgacccaccttttttgtcggcgagtgtggggcaaccacgccgactgccaggcgcaggatcccacaagagtttgggcatgagggagaccggctaaacagctcaccgagagcctggtcagcgccacagaccaaacgcccagctttgtgctgtgtgctctgtgctctgtgctgtgtgtcacctctgtccgggccactggccggtcggacgagtagggttcgagtcagccagctgcttgacatttttgttttcggaggcgggtggctcccggcctggcggttcgaggcttcgggtatgtgaggcagtggaccatggcggagcgcggagaatcgacaaggcgtggatgctggcgcctcacgggtgctaatgtgctggtggagaggacgatcgttgtaatgggtgcggaggcttgcttggcgatgtgtggagggatggcgctgtgaggcggttgtgcgtcgttttgtttggtgtgttttgtggcgagttggcgtgtgcgtgtgtgtgtgtgtgtgttggtctgagcgcgtcgattgcgttgcggtttgggtttgtgtctgggcgcttagctcaaatggtagagcgcccgcttcgcatgcgggaggtagggggatcgatacccccagtgtccactttttacggcacacaacactttttacgaacaaacactttttaccgcccctcgcgccgctgcttgcttcctagccttcctacccctgctcacccgccacccacagctcacccgccatctgcgagcgtgctggtgcctacgtttacagacgacccaccttttttgtcggcgagtgtggggcaaccacgccgactgccaggcgcaggatcccacaagagtttgggcatgagggagaccggctaaacagctcaccgagagcctggtcagcgccacagaccaaacgcccagctgtgtgctgtgtgctctgtgctctgtgctgtgtgtcacctctgtccgggccactggccggtcggacgagtagggttcgagtcagccagctgcttgacatttttgttttcggaggcgggtggctcccggcctggcggttcgaggcttcgggtatgtgaggcagtggaccatggcggagcgcggagaatcgacaaggcgtggatgctggcgcctcacgggttttaatgtgctggtggagaggacgatcgttgtaatgggtgcggaggcttgcttggcgatgtgtggagggatggcgctgtgaggcggttgtgtgtggttttgtttggtgtgttttgtggcgagttggcgtgtgcgtgtgtgtgtgtgtgtgtgtgtgttggtctgagcgcgtcgattgcgttgcggtttgggtttgtgtctgggcgcttagctcaaatggtagagcgcccgcttcgcatgcggatcgatacccccagtgtccacttttacggcacgcaacactttttacgaacaaacactttttaccgcccctcgcgccgctgcttgcttcctagccttcctacccctgctcacccgccacccacagctcacccgccatctgcgagcgtgctggtgcctacgtttacagacgacccaccttttttgtcggcgagtgtggggcaaccacgccgactgccaggcgcaggatcccacaagagtttgggcatgagggagaccggctaaacagctcaccgagagcctggtcagcgccacagaccaaacgcccagctgtgtgctgtgtgctctgtgctctgtgctgtgtgtcacctctgtccgggccactggccggtcggacgagtagggttcgagtcagccagctgcttgacatttttgttttcggaggcgggtggctcccggcctggcggttcgaggcttcgggtatgtgaggcagtggaccatggcggagcgcggagaatcgacaaggcgtggatgctggcgcctcacgggtgctaatgtgctggtggagaggacgatcgttgtaatgggtgcggaggcttgcttggcgatgtgtggagggatggcgctgtgaggcggttgtgtgtcattttgtttggtgtgttttgtggcgagttggcgtgtgcgtgtgtgtgtgtgtgttggtctgagcgcgtcgattgcgttgcggtttgggtttgtgtctgggcgcttagctcaaatggtagagcgcccgcttcgcatgcgggaggtagggggatcgataccctcagtgtccactttttacggcacacaacacttttacgaacaaacacttttaccgcccctcgcgccgctgcttgcttcctagccttcctacccctgctcacccgccacccaagctcacccgccatctgcgagcgtgctggtgcctacgtttacagacgacccaccttttttgtcggcgagtgtggggcaaccacgccgactgccaggcgcaggatcccacaagagtttgggcatgagggagaccggctaaacagctcaccgagagcctggtcagcgccacagaccaaacgcccagctttgtgctgtgtgctctgtgctctgtgctgtgtgtcacctctgtccgggccactggccggtcggacgagtagggttcgagtcagccagctgcttgacatttttgttttcggaggcgggtggctcccggcctggcggttcgaggcttcgggtatgtgaggcagtggaccatggcggagcgcggagaatcgacaaggcgtggatgctggcgcctcacgggtgctaatgtgctggtggagaggacgatcgttgtaatgggtgcggaggcttgcttggcgatgtgtggagggatggcgctgtgaggcggttgtgtgtggttttgtttggtgtgttttgtggcgagttggcgtgtgcgtgtgtgtgtgtgtgtgttggtctgagcgcgtcgattgcgttgcggtttgggtttgtgtctgggcgcttagctcaaatggtagagcgcccgcttcgcatgcgggaggtagggggatcgatacccccagtgtccactttttacggcacacaacactttttacgaacaaacactttttaccgcccctcgcgccgctgcttgcttcctagccttcctacccctgctcacccgccacccacagctcacccgccatctgcgagcgtgctggtgcctacgtttacagacgacccaccttttttgtcggcgagtgtggggcaaccacgccgactgccaggcgcaggatcccacaagagtttgggcatgagggagaccggctaaacagctcaccgagagcctggtcagcgccacagaccaaacgcccagctgtgtgctgtgtgctctgtgctctgtgctgtgtgtcacctctgtccgggccactggccggtcggacgagtagggttcgagtcagccagctgcttgacatttttgttttcggaggcgggtggctcccggcctggcggttcgaggcttcgggtatgtgaggcagtggaccatggcggagcgcggagaatcgacaaggcgtggatgctggcgcctcacgggtgctaatgtgctggtggagaggacgatcgttgtaatgggtgcggaggcttgcttggcgatgtgtggagggatggcgctgtgaggcggttgtgtgtcattttgtttggtgtgttttgtggcgagttggcgtgtgcgtgtgtgtgtgtgttggtctgagcgcgtcgattgcgttgcggtttgggtttgtgtctgggcgcttagctcaaatggtagagcacccgcttcgcatgcggatcgatacccccagtgtccacttttacggcacacaacactttttacgaacaaacactttttaccgcccctcgcgccgctgcttgcttcctagccttcctacccctgctcacccgccacccacagctcacccgccatctgcgagcgtgctggtgcctacgtttacagacgacccaccttttttgtcggcgagtgtggggcaaccacgccgactgccaggcgcaggatcccacaagagtttgggcatgagggagaccgggtaaacagctcaccgagagcctggtcagcgccacagaccaaacgcccagctgtgtgctgtgtgctctgtgctctgtgctgtgtgtcacctctgtccgggcgggttcgagtcagccagctgcttgacatttttgttttcggaggcgggtggctcccggcctggcggttcgaggcttcgggtatgtgaggcagtggaccatggcggagcgcggagaatcgacaaggcgtggatgctggcgcctcacgggtgctaatgtgctggtggagaggacgatcgttgtaatgggtgcggaggcttgcttggcgatgtgtggagggatggcgctgtgaggcggttgtgcgtcgtttcgtttggtgtgttttgtggcgagttggcgtgtgcgtgcgtgtgtgtgtgttgatctgagcgcgtcgattgcgttgcggtttgggtttgtgtctgggcgcttagctcaaatggtagagcacccgcttcgcatgcggatcgatacccccagtgtccacttttacggcacacaacactttttacgaacaaacactttttaccgcccctcgcgccgctgcttgcttcctagccttcctacccctgctcacccgccacccacagctcacccgccatctgcgagcgtgctggtgcctacgtttacagacgacccaccttttttgtcggcgagtgtggggcaaccacgccgactgccaggcgcaggatcccacaagagtttgggcatgagggagaccggctaaacagctcaccgagagcctggtcagcgccacagaccaaacgcccagctttgagctgtgtgctctgtgctctgtgctgtgtgtcacctctgtccgggccactggccggtcggacgagtagggttcgagtcagccagctgcttgacatttttgttttcggaggcgggtagctcccggcctggcggttcgaggcttcgggtatgtgaggcagtggaccatggcggagcgcggagaatcgacaaggcgtggatgctggcgcctcacgggtgctaatgtgctggtggagaggacgatcgttgtaatgggtgcggaggcttgcttggcgatgtgtggagggatggcgctgtgaggcggttgtgcgtcgtttcgtttggtgtgttttgtggcgagttggcgtgtgcgtgtgtgtgttgatctgagcgcgtcgattgcgttgcggcttgggtttgcgtctgggcgcttagctcaaatggtagagcgcccgcttcgcatgcgggaggtagggggatcgatacccccagtgtccacttttacggcacacaacacttttacgaacaaacactttttaccgcccctcgcgccgctgcttgcttcctagccttcctacccctgctcacccgccacccaagctcacccgccatctgcgagcgtgctggtgcctacgtttacagacgacccaccttttttgtcggcgagtgtggggcaaccacgccgactgccaggcgcaggatcccacaagagtttgggcatgagggagaccggctaaacagctcaccgagagcctggtcagcgccacagaccaaacgcccagctgtgtgctgtgtgctctgtgctctgtgctgtgtgtcacctctgtccgggcgggttcgagtcagccagctgcttgacatttttgttttcggaggcgggtggctcccggcctggcggttcgaggcttcgggtatgtgaggcagtggaccatggcggagcgcggagaatcgacaaggcgtggatgctggcgcctcacgggtgctaatgtgctggtggagaggacgatcgttgtaatgggtgcggaggcttgcttggcgatgtgtggagggatggcgctgtgaggcggttgtgcgtcgttttgtttggtgtgttttgtggcgagttggcgtgtgcgtgcgtgtgtgtgtgttgatctgagcgcgtcgattgcgttgcggtttgggtttgtgtctgggcgcttagctcaaatggtagagcacccgcttcgcatgcggatcgatacccccagtgtccacttttacggcacacaacactttttacgaacaaacactttttaccgcccctcgcgccgctgcttgcttcctagccttcctacccctgctcacccgccacccacagctcacccgccatctgcgagcgtgctggtgcctacgtttacagacgacccaccttttttgtcggcgagtgtggggcaaccacgccgactgccaggcgcaggatcccacaagagtttgggcatgagggagaccgggtaaacagctcaccgagagcctggtcagcgccacagaccaaacgcccagctgtgtgctgtgtgctctgtgctctgtgctgtgtgtcacctctgtccgggcgggttcgagtcagccagctgcttgacatttttgttttcggaggcgggtggctcccggcctggcggttcgaggcttcgggtatgtgaggcagtggaccatggcggagcgcggagaatcgacaaggcgtggatgctggcgcctcacgggtgctaatgtgctggtggagaggacgatcgttgtaatgggtgcggaggcttgcttggcgatgtgtggagggatggcgctgtgaggcggttgtgtgtggttttgtttggtgtgttttgtggcgagttggcgtgtgcgtgtgtgtgtctgtgtgttggtctgagcgcgtcgattgcgttgcggtttgggtttgtgtctgggcgcttagctcaaatggtagagcgcccgcttcgcatgcgggaggtagggggatcgatacccccagtgtccactttttacggcacacaacactttttacgaacaaacactttttaccgcccctcgcgccgctgcttgcttcctagccttcctacccctgctcacccgccacccacagctcacccgccatctgcgagcgtgctggtgcctacgtttacagacgacccaccttttttgtcggcgagtgtggggcaaccacgccgactgccaggcgcaggatcccacaagagtttgggcatgagggagaccggctaaacagctcaccgagagcctggtcagcgccacagaccaaacgcccagctgtgtgctgtgtgctctgtgctctgtgctgtgtgtcacctctgtccgggccactggccggtcggacgagtagggttcgagtcagccagctgcttgacatttttgttttcggaggcgggtggctcccggcctggcggttcgaggcttcgggtatgtgaggcagtggaccatggcggagcgcggagaatcgacaaggcgtggatgctggcgcctcacgggtgctaatgtgctggtggagaggacgatcgttgtaatgggtgcggaggcttgcttggcgatgtgtggagggatggcgctgtgaggcggttgtgtgtggttttgtttggtgtgttttgtggcgagttggcgtgtgcgtgtgtgtgtgtgtgttggtctgagcgcgtcgattgcgttgcggtttgggtttgtgtctgggcgcttagctcaaatggtagagcgcccgcttcgcatgcggatcgatacccccagtgtccacttttacggcacgcaacactttttacgaacaaacactttttaccgcccctcgcgccgctgcttgcttcctagccttcctacccctgctcacccgccacccacagctcacccgccatctgcgagcgtgctggtgcctacgtttacagacgacccaccttttttgtcggcgagtgtggggcaaccacgccgactgccaggcgcagaatcccacaagagtttgggcatgagggagaccggctaaacagctcaccgagagcctggtcagcgccacagaccaaacgcccagctgtgtgctgtgtgctctgtgctctgtgctgtgtgtcacctctgtccgggccactggccggtcggacgagtagggttcgagtcagccagctgcttgacatttttgttttcggaggcgggtggctcccggcctggcggttcgaggcttcgggtatgtgaggcagtggaccatggcggagcgcggagaatcgacaaggcgtggatgctggcgcctcacgggtgctaatgtgctggtggagaggacgatcgttgtaatgggtgcggaggcttgcttggcgatgtgtggagggatggcgctgtgaggcggttgtgtgtggttttgtttggtgtgttttgtggcgagttggcgtgtgcgtgtgtgtgtgtgtgttggtctgagcgcgtcgattgcgttgcggtttgggtttgtgtctgggcgcttagctcaaatggtagagcgcccgcttcgcatgcgggaggtagggggatcgatacccccagtgtccactttttacggcacacaacactttttacgaacaaacactttttaccgcccctcgcgccgctgcttgcttcctagccttcctacccctgctcacccgccacccaagctcacccgccatctgcgagcgtgctggtgcctacgtttacagacgacccaccttttttgtcggcgagtgtggggcaaccacgccgactgccaggcgcaggatcccacaagagtttgggcatgagggagaccggctaaacagctcaccgagagcctggtcagcgccacagaccaaacgcccagctttgtgctgtgtgctctgtgctctgtgctgtgtgtcacctctgtccgggccactggccggtcggacgagtagggttcgagtcagccagctgcttgacatttttgttttcggaggcgggtggctcccggcctggcggttcgaggcttcgggtatgtgaggcagtggaccatggcggagcgcggagaatcgacaaggcgtggatgctggcgcctcacgggtgctaatgtgctggtggagaggacgatcgttgtaatgggtgcggaggcttgcttggcgatgtgtggagggatggcgctgtgaggcggttgtgcgtcgttttgtttggtgtgttttgtggcgagttggcgtgtgcgtgtgtgtgtgtgtgtgttggtctgagcgcgtcgattgcgttgcggtttgggtttgtgtctgggcgcttagctcaaatggtagagcgcccgcttcgcatgcgggaggtagggggatcgatacccccagtgtccactttttacggcacacaacactttttacgaacaaacactttttaccgcccctcgcgccgctgcttgcttcctagccttcctacccctgctcacccgccacccacagctcacccgccatctgcgagcgtgctggtgcctacgtttacagacgacccaccttttttgtcggcgagtgtggggcaaccacgccgactgccaggcgcaggatcccacaagagtttgggcatgagggagaccggctaaacagctcaccgagagcctggtcagcgccacagaccaaacgcccagctgtgtgctgtgtgctctgtgctctgtgctgtgtgtcacctctgtccgggccactggccggtcggacgagtagggttcgagtcagccagctgcttgacatttttgttttcggaggcgggtggctcccggcctggcggttcgaggcttcgggtatgtgaggcagtggaccatggcggagcgcggagaatcgacaaggcgtggatgctggcgcctcacgggtgctaatgtgctggtggagaggacgatcgttgtaatgggtgcggaggcttgcttggcgatgtgtggagggatggcgctgtgaggcggttgtgtgtggttttgtttggtgtgttttgtggcgagttggcgtgtgcgtgtgtgtgtgtgtgtgtgttggtctgagcgcgtcgattgcgttgcggtttgggtttgtgtctgggcgcttagctcaaatggtagagcgcccgcttcgcatgcgggaggtagggggatcgatacccccagtgtccactttttacggcacacaacactttttacgaacaaacactttttaccgcccctcgcgccgctgcttgcttcctagccttcctacccctgctcacccgccacccacagctcacccgccatctgcgagcgtgctggtgcctacgtttacagacgacccaccttttttgtcggcgagtgtggggcaaccacgccgactgccaggcgcaggatcccacaagagtttgggcatgagggagaccggctaaacagctcaccgagagcctggtcagcgccacagaccaaacgcccagctttgtgctgtgtgctctgtgctctgtgctgtgtgtcacctctgtccgggccactggccggtcggacgagtagggttcgagtcagccagctgcttgacatttttgttttcggaggcgggtggctcccggcctggcggttcgaggcttcgggtatgtgaggcagtggaccatggcggagcgcggagaatcgacaaggcgtggatgctggcgcctcacgggtgctaatgtgctggtggagaggacgatcgttgtaatgggtgcggaggcttgcttggcgatgtgtggagggatggcgctgtgaggcggttgtgcgtcgttttgtttggtgtgttttgtggcgagttggcgtgtgcgtgtgtgtgtgtgtgtgttggtctgagcgcgtcgattgcgttgcggtttgggtttgtgtctgggcgcttagctcaaatggtagagcgcccgcttcgcatgcgggaggtaggggggtcgatacccccagtgtccactttttacggcacacaacactttttacgaacaaacactttttaccgcccctcgcgccgctgcttgcttcctagccttcctacccctgctcacccgccacccaagctcacccgccatctgcgagcgtgctggtgcctacgtttacagacgacccaccttttttgtcggcgagtgtggggcaaccacgccgactgccaggcgcaggatcccacaagagtttgggcatgagggagaccggctaaacagctcaccgagagcctggtcagcgccacagaccaaacgcccagctttgtgctgtgtgctctgtgctctgtgctgtgtgtcacctctgtccgggccactggccggtcggacgagtagggttcgagtcagccagctgcttgacatttttgttttcggaggcgggtggctcccggcctggcggttcgaggcttcgggtatgtgaggcagtggaccatggcggagcgcggagaatcgacaaggcgtggatgctggcgcctcacgggtgctaatgtgctggtggagaggacgatcgttgtaatgggtgcggaggcttgcttggcgatgtgtggagggatggcgctgtgaggcggttgtgcgtcgttttgtttggtgtgttttgtggcgagttggcgtgtgcgtgtgtgtgtgtgtgtgttggtctgagcgcgtcgattgcgttgcggtttgggtttgtgtctgggcgcttagctcaaatggtagagcgcccgcttcgcatgcgggaggtagggggatcgatacccccagtgtccactttttacggcacacaacactttttacgaacaaacactttttaccgcccctcgcgccgctgcttgcttcctagccttcctacccctgctcacccgccacccacagctcacccgccatctgcgagcgtgctggtgcctacgtttacagacgacccaccttttttgtcggcgagtgtggggcaaccacgccgactgccaggcgcaggatcccacaagagtttgggcatgagggagaccggctaaacagctcaccgagagcctggtcagcgccacagaccaaacgcccagctgtgtgctgtgtgctctgtgctctgtgctgtgtgtcacctctgtccgggccactggccggtcggacgagtagggttcgagtcagccagctgcttgacatttttgtttcggaggcgggtggctcccggcctggcggttcgaggcttcgggtatgtgaggcagtggaccatggcggagcgcggagaatcgacaaggcgtggatgctggcgcctcacgggtgctaatgtgctgttggagaggacgatcgttgtaatgggtgcggaggcttgcttggcgatgtgtggagggatggcgctgtgaggcggttgtgtgtcgttttgtttggtgtgttttgtggcgagttggcgtgtgcgtgtgtgtgtgtgtgtgttggtctgagcgcgtcgattgcgttgcggtttgggtttgtgtctgggcgcttagctcaaatggtagagcgcccgcttcgcatgcgggaggtaggggggtcgatacccccagtgtccactttttacggcacacaacactttttacgaacaaacactttttaccgcccctcgcgccgctgcttgcttcctagccttcctacccctgctcacccgccacccaagctcacccgccatctgcgagcgtgctggtgcctacgtttacagacgacccaccttttttgtcggcgagtgtggggcaaccacgccgactgccaggcgcaggatcccacaagagtttgggcatgagggagaccggctaaacagctcaccgagagcctggtcagcgccacagaccaaacgcccagctgtgtgctgtgtgctctgtgctctgtgctgtgtgtcacctctgtccgggccactggccggtcggacgagtagggttcgagtcagccagctgcttgacatttttgttttcggaggcgggtggctcccggcctggcggttcgaggcttcgggtatgtgaggcagtggaccatggcggagcgcggagaatcgacaaggcgtggatgctggcgcctcacgggtgctaatgtgctggtggagaggacgatcgttgtaatgggtgcggaggcttgcttggcgatgtgtggagggatggcgctgtgaggcggttgtgtgtcattttgtttggtgtgttttgtggcgagttggcgtgtgcgtgtgtgtgtgtgttggtctgagcgcgtcgattgcgttgcggtttgggtttgtgtctgggcgcttagctcaaatggtagagcacccgcttcgcatgcggatcgatacccccagtgtccacttttacggcacacaacactttttacgaacaaacactttttaccgcccctcgcgccgctgcttgcttcctagccttcctacccctgctcacccgccacccacagctcacccgccatctgcgagcgtgctggtgcctacgtttacagacgacccaccttttttgtcggcgagtgtggggcaaccacgccgactgccaggcgcaggatcccacaagagtttgggcatgagggagaccggctaaacagctcaccgagagcctggtcagcgccacagaccaaacgcccagctgtgtgctgtgtgctctgtgctctgtgctgtgtgtcacctctgtccgggccactggccggtcggacgagtagggttcgagtcagccagctgcttgacatttttgttttcggaggcgggtggctcccggcctggcggttcgaggcttcgggtatgtgaggcagtggaccatggcggagcgcggagaatcgacaaggcgtggatgctggcgcctcacgggtgctaatgtgctggtggagaggacgatcgttgtaatgggtgcggaggcttgcttggcgatgtgtggagggatggcgctgtgaggcggttgtgcgtcgttttgtttggtgtgttttgtggcgagttggcgtgtgcgtgtgtgtgtgtgtgttggtctgagcgcgtcgattgcgttgcggtttgggtttgtgtctgggcgcttagctcaaatggtagagcgcccgcttcgcatgcgggaggtagggggatcgatacccccagtgtccactttttacggcacacaacactttttacgaacaaacactttttaccgcccctcgcgccgctgcttgcttcctagccttcctacccctgctcacccgccacccaagctcacccgccatctgcgagcgtgctggtgcctacgtttacagacgacccaccttttttgtcggcgagtgtggggcaaccacgccgactgccaggcgcaggatcccacaagagtttgggcatgagggagaccggctaaacagctcaccgagagcctggtcagcgccacagaccaaacgcccagctgtgtgctgtgtgctctgtgctgtgtgtcacctctgtccgggccactggccggtcggacgagtagggttcgagtcagccagctgcttgacatttttgttttcggaggcgggtggctcccggcctggcggttcgaggcttcgggtatgtgaggcagtggaccatggcggagcgcggagaatcgacaaggcgtggatgctggcgcctcacgggtgctaatgtgctggtggagaggacgatcgttgtaatgggtgcggaggcttgcttggcgatgtgtggagggatggcgctgtgaggcggttgtgtgtcgttttgtttggtgtgttttgtggcgagttggcgtgtgcgtgtgtgtgtgtgtgttggtctgagcgcgtcgattgcgttgcggtttgggtttgtgtctgggcgcttagctcaaatggtagagcgcccgcttcgcatgcgggaggtagggggatcgatacccccagtgtccactttttacggcacacaacactttttacgaacaaacactttttaccgcccctcgcgccgctgcttgcttcctagccttcctacccctgctcacccgccacccacagctcacccgccatctgcgagcgtgctggtgcctacgtttacagacgacccaccttttttgtcggcgagtgtggggcaaccacgccgactgccaggcgcaggatcccacaagagtttgggcatgagggagaccggctaaacagctcaccgagagcctggtcagcgccacagaccaaacgcccagctttgtgctgtgtgctctgtgctgtgtgctgtgtgtcacctctgtccgggccactggccggtcggacgagtagggttcgagtcagccagctgcttgacatttttgttttcggaggcgggtggctcccggcctggcggttcgaggcttcgggtatgtgaggcagtggaccatggcggagcgcggagaatcgacaaggcgtggatgctggcgcctcacgggtgctaatgtgctggtggagaggacgatcgttgtaatgggtgcggaggcttgcttggcgatgtgtggagggatggcgctgtgaggcggttgtgtgtggttttgtttggtgtgttttgtggcgagttggcgtgtgcgtgtgtgtgtgtgtgtgttggtctgagcgcgtcgattgcgttgcggtttgggtttgtgtctgggcgcttagctcaaatggtagagcgcccgcttcgcatgcgggaggtagggggatcgatacccccagtgtccactttttacggcacacaacactttttacgaacaaacactttttaccgcccctcgcgccgctgcttgcttcctagccttcctacccctgctcacccgccacccaagctcacccgccatctgcgagcgtgctggtgcctacgtttacagacgacccaccttttttgtcggcgagtgtggggcaaccacgccgactgccaggcgcaggatcccacaagagtttgggcatgagggagaccggctaaacagctcaccgagagcctggtcagcgccacagaccaaacgcccagctttgtgctgtgtgctctgtgctctgtgctgtgtgtcacctctgtccgggccactggccggtcggacgagtagggttcgagtcagccagctgcttgacatttttgttttcggaggcgggtggctcccggcctggcggttcgaggcttcgggtatgtgaggcagtggaccatggcggagcgcggagaatcgacaaggcgtggatgctggcgcctcacgggtgctaatgtgctggtggagaggacgatcgttgtaatgggtgcggaggcttgcttggcgatgtgtggagggatggcgctgtgaggcggttgtgtgtcgttttgtttggtgtgttttgtggcgagttggcgtgtgcgtgtgtgtgtgtgttggtctgagcgcgtcgattgcgttgcggtttgggtttgtgtctgggcgcttagctcaaatggtagagcgcccgcttcgcatgcgggaggtagggggatcgatacccccagtgtccactttttacggcacacaacactttttacgaacaaacactttttaccgcccctcgcgccgctgcttgcttcctagccttcctacccctgctcacccgccacccacagctcacccgccatctgcgagcgtgctggtgcctacgtttacagacgacccaccttttttgtcggcgagtgtggggcaaccacgccgactgccaggcgcaggatcccacaagagtttgggcatgagggagaccggctaaacagctcaccgagagcctggtcagcgccacagaccaaacgcccagctttgtgctgtgtgctctgtgctctgtgctgtgtgtcacctctgtccgggccactggccggtcggacgagtagggttcgagtcagccagctgcttgacatttttgttttcggaggcgggtggctcccggcctggcggttcgaggcttcgggtatgtgaggcagtggaccatggcggagcgcggagaatcgacaaggcgtggatgctggcgcctcacgggtgctaatgtgctggtggagaggacgatcgttgtaatgggtgcggaggcttgcttggcgatgtgtggagggatggcgctgtgaggcggttgtgtgtggttttgtttggtgtgttttgtggcgagttggcgtgtgcgtgtgtgtgtgtgtgtgttggtctgagcgcgtcgattgcgttgcggtttgggtttgtgtctgggcgcttagctcaaatggtagagcgcccgcttcgcatgcgggaggtagggggatcgatacccccagtgtccactttttacggcacacaacactttttacgaacaaacactttttaccgcccctcgcgccgctgcttgcttcctagccttcctacccctgctcacccgccacccaagctcacccgccatctgcgagcgtgctggtgcctacgtttacagacgacccaccttttttgtcggcgagtgtggggcaaccacgccgactgccaggcgcaggatcccacaagagtttgggcatgagggagaccggctaaacagctcaccgagagcctggtcagcgccacagaccaaacgcccagctgtgtgctgtgtgctctgtgctctgtgctgtgtgtcacctctgtccgggccactggccggtcggacgagtagggttcgagtcagccagctgcttgacatttttgttttcggaggcgggtggctcccggcctggcggttcgaggcttcgggtatgtgaggcagtggaccatggcggagcgcggagaatcgacaaggcgtggatgctggcgcctcacgggtgctaatgtgctggtggagaggacgatcgttgtaatgggtgcggaggcttgcttggcgatgtgtggagggatgacgctgtgaggcggttgtgtgtggttttgtttggtgtgttttgtggcgagttggcgtgtgcgtgtgtgtgtgtgtgttggtctgagcgcgtcgattgcgttgcggtttgggtttgtgtctgggcgcttagctcaaatggtagagcgcccgcttcgcatgcgggaggtagggggatcgatacccccagtgtccactttttacggcacacaacactttttacgaacaaacactttttaccgcccctcgcgccgctgcttgcttcctagccttcctacccctgctcacccgccacccacagctcacccgccatctgcgagcgtgctggtgcctacgtttacagacgacccaccttttttgtcggcgagtgtggggcaaccacgccgactgccaggcgcaggatcccacaagagtttgggcatgagggagaccggctaaacagctcaccgagagcctggtcagcgccacagaccaaacgcccagctttgtgctgtgtgctctgtgctctgtgctgtgtgtcacctctgtccgggccactggccggtcggacgagtagggttcgagtcagccagctgcttgacatttttgttttcggaggcgggtggctcccggcctggcggttcgaggcttcgggtatgtgaggcagtggaccatggcggagcgcggagaatcgacaaggcgtggatgctggcgcctcacgggtgctaatgtgctggtggagaggacgatcgttgtaatgggtgcggaggcttgcttggcgatgtgtggagggatggcgctgtgaggcggttgtgtgtggttttgtttggtgtgttttgtggcgagttggcgtgtgcgtgtgtgtgtgtgtgttggtctgagcgcgtcgattgcgttgcggtttgggtttgtgtctgggcgcttagctcaaatggtagagcgcccgcttcgcatgcggatcgatacccccagtgtccacttttacggcacacaacactttttacgaacaaacactttttaccgcccctcgcgccgctgcttgcttcctagccttcctacccctgctcacccgccacccacagctcacccgccatctgcgagcgtgctggtgcctacgtttacagacgacccaccttttttgtcggcgagtgtggggcaaccacgccgactgccaggcgcaggatcccacaagagtttgggcatgagggagaccggctaaacagctcaccgagagcctggtcagcgccacagaccaaacgcccagctgtgtgctgtgtgctctgtgctctgtgctgtgtgtcacctctgtccgggccactggccggtcggacgagtagggttcgagtcagccagctgcttgacatttttgttttcggaggcgggtggctcccggcctggcggttcgaggcttcgggtatgtgaggcagtggaccatggcggagcgcggagaatcgacaaggcgtggatgctggcgcctcacgggtgctaatgtgctggtggagaggacgatcgttgtaatgggtgcggaggcttgcttggcgatgtgtggagggatggcgctgtgaggcggttgtgtgtcattttgtttggtgtgttttgtggcgagttggcgtgtgcgtgtgtgtgtgtgtgttggtctgagcgcgtcgattgcgttgcggtttgggtttgtgtctgggcgcttagctcaaatggtagagcgcccgcttcgcatgcgggaggtagggggatcgatacccccagtgtccactttttacggcacacaacactttttacgaacaaacactttttaccgcccctcgcgccgctgcttgcttcctagccttcctacccctgctcacccgccacccacagctcacccgccatctgcgagcgtgctggtgcctacgtttacagacgacccaccttttttgtcggcgagtgtggggcaaccacgccgactgccaggcgcaggatcccacaagagtttgggtatgagggagaccggctaaacagctcaccgagagcctggtcagcgccacagaccaaacgcccagctttgtgctgtgtgctctgtgctctgtgctgtgtgtcacctctgtccgggccactggccggtcggacgagtagggttcgagtcagccagctgcttgacatttttgttttcggaggcgggtggctcccggcctggcggttcgaggcttcgggtatgtgaggcagtggaccatggcggagcgcggagaatcgacaaggcgtggatgctggcgcctcacgggtgctaatgtgctggtggagaggacgatcgttgtaatgggtgcggaggcttgcttggcgatgtgtggagggatggcgctgtgaggcggttgtgcgtcgttttgtttggtgtgttttgtggcgagttggcgtgtgcgtgtgtgtgtgtgtgtgtgttggtctgagcgcgtcgattgcgttgcggtttgggtttgtgtctgggcgcttagctcaaatggtagagcgcccgcttcgcatgcgggaggtagggggatcgatacccccagtgtccactttttacggcacacaacactttttacgaacaaacactttttaccgcccctcgcgccgctgcttgcttcctagccttcctacccctgctcacccgccacccaagctcacccgccatctgcgagcgtgctggtgcctacgtttacagacgacccaccttttttgtcggcgagtgtggggcaaccacgccgactgccaggcgcaggatcccacaagagtttgggcatgagggagaccggctaaacagctcaccgagagcctggtcagcgccacagaccaaacgcccagctttgtgctgtgtgctctgtgctctgtgctgtgtgtcacctctgtccgggccactggccggtcggacgagtagggttcgagtcagccagctgcttgacatttttgttttcggaggcgggtggctcccggcctggcggttcgaggcttcgggtatgtgaggcagtggaccatggcggagcgcggagaatcgacaaggcgtggatgctggcgcctcacgggtgctaatgtgctggtggagaggacgatcgttgtaatgggtgcggaggcttgcttggcgatgtgtggagggatggcgctgtgaggcggttgtgcgtcgttttgtttggtgtgttttgtggcgagttggcgtgtgcgtgtgtgtgtgtgtgtgttggtctgagcgcgtcgattgcgttgcggtttgggtttgtgtctgggcgcttagctcaaatggtagagcgcccgcttcgcatgcgggaggtagggggatcgatacccccagtgtccactttttacggcacacaacactttttacgaacaaacactttttaccgcccctcgcgccgctgcttgcttcctagccttcctacccctgctcacccgccacccaagctcacccgccatctgcgagcgtgctggtgcctacgtttacagacgacccaccttttttgtcggcgagtgtggggcaaccacgccgactgccaggcgcaggatcccacaagagtttgggcatgagggagaccggctaaacagctcaccgagagcctggtcagcgccacagaccaaacgcccagctttgtgctgtgtgctctgtgctctgtgctgtgtgtcacctctgtccgggccactggccggtcggacgagtagggttcgagtcagccagctgcttgacatttttgttttcggaggcgggtggctcccggcctggcggttcgaggcttcgggtatgtgaggcagtggaccatggcggagcgcggagaatcgacaaggcgtggatgctggcgcctcacgggtgctaatgtgctggtggagaggacgatcgttgtaatgggtgcggaggcttgcttggcgatgtgtggagggatggcgctgtgaggcggttgtgtgtcgttttgtttggtgtgttttgtggcgagttggcgtgtgcgtgtgtgtgtgtgtgttggtctgagcgcgtcgattgcgttgcggtttgggtttgtgtctgggcgcttagctcaaatggtagagcgcccgcttcgcatgcgggaggtagggggatcgatacccccagtgtccactttttacggcacacaacactttttacgaacaaacactttttaccgcccctcgcgccgctgcttgcttcctagccttcctacccctgctcacccgccacccaagctcacccgccatctgcgagcgtgctggtgcctacgtttacagacgacccaccttttttgtcggcgagtgtggggcaaccacgccgactgccaggcgcaggatcccacaagagtttgggcatgagggagaccggctaaacagctcaccgagagcctggtcagcgccacagaccaaacgcccagctgtgtgctgtgtgctctgtgctgtgtgtcacctctgtccgggccactggccggtcggacgagtagggttcgagtcagccagctgcttgacatttttgtttcggaggcgggtggctcccggcctggcggttcgaggcttcgggtatgtgaggcagtggaccatggcggagcgcggagaatcgacaaggcgtggatgctggcgcctcacgggtgctaatgtgctggtggagaggacgatcgttgtaatgggtgcggaggcttgcttggcgatgtgtggagggatggcgctgtgaggcggttgtgtgtggttttgtttggtgtgttttgtggcgagttggcgtgtgcgtgtgtgtgtgtgtgtgttggtctgagcgcgtcgattgcgttgcggtttgggtttgtgtctgggcgcttagctcaaatggtagagcgcccgcttcgcatgcgggaggtagggggatcgatacccccagtgtccactttttacggcacacaacactttttacgaacaaacactttttaccgcccctcgcgccgctgcttgcttcctagccttcctacccctgctcacccgccacccacagctcacccgccatctgcgagcgtgctggtgcctacgtttacagacgacccaccttttttgtcggcgagtgtggggcaaccacgccgactgccaggcgcaggatcccacaagagtttgggcatgagggagaccggctaaacagctcaccgagagcctggtcagcgccacagaccaaacgcccagctgtgtgctgtgtgctctgtgctctgtgctgtgtgtcacctctgtctgggcgggttcgagtcagccagctgcttgacatttttgttttcggaggcgggtggctcccggcctggcggttcgaggcttcgggtatgtgaggcagtggaccatggcggagcgcggagaatcgacaaggcgtggatgctggcgcctcacgggtgctaatgtgctggtggagaggacgatcgttgtaatgggtgcggaggcttgcttggcgatgtgtggagggatggcgctgtgaggcggttgtgtgtcgttttgtttggtgtgttttgtggcgagttggcgtgtgcgtgtgtgtgtgtgtgttggtctgagcgcgtcgattgcgttgcggtttgggtttgtgtctgggcgcttagctcaaatggtagagcgcccgcttcgcatgcgggaggtagggggatcgatacccccagtgtccactttttacggcacacaacactttttacgaacaaacactttttaccgcccctcgcgccgctgcttgcttcctagccttcctacccctgctcacccgccacccacagctcacccgccatctgcgagcgtgctggtgcctacgtttacagacgacccaccttttttgtcggcgagtgtggggcaaccacgccgactgccaggcgcaggatcccacaagagtttgggcatgagggagaccggctaaacagctcaccgagagcctggtcagcgccacagaccaaacgcccagctgtgtgctctgtgctctgtgctgtgtgtcacctctgtccgggccactggccggtcggacgagtagggttcgagtcagccagctgcttgacatttttgttttcggaggcgggtggctcccggcctggcggttcgaggcttcgggtatgtgaggcagtggaccatggcggagcgcggagaatcgacaaggcgtggatgctggcgcctcacgggtgctaatgtgctggtggagaggacgatcgttgtaatgggtgcggaggcttgcttggcgatgtgtggagggatggcgctgtgaggcggttgtgtgtggttttgtttggtgtgttttgtggcgagttggcgtgtgcgtgtgtgtgtgtgtgtgttggtctgagcgcgtcgattgcgttgcggtttgggtttgtgtctgggcgcttagctcaaatggtagagcgcccgcttcgcatgcgggaggtagggggatcgatacccccagtctccactttttacggcacgcaacactttttacgaacaaacactttttaccgcccctcgcgccgctgcttgcttcctagccttcctacccctgctcacccgccacccaagctcacccgccatctgcgagcgtgctggtgcctacgtttacagacgacccaccttttttgtcggcgagtgtggggcaaccacgccgactgccaggcgcaggatcccacaagagtttgggcatgagggagaccggctaaacagctcaccgagagcctggtcagcgccacagaccaaacgcccagctttgtgctgtgtgctctgtgctctgtgctgtgtgtcacctctgtccgggccactggccggtcggacgagtagggttcgagtcagccagctgcttgacatttttgttttcggaggcgggtggctcccggcctggcggttcgaggcttcgggtatgtgaggcagtggaccatggcggagcgcggagaatcgacaaggcgtggatgctggcgcctcacgggtgctaatgtgctggtggagaggacgatcgttgtaatgggtgcggaggcttgcttggcgatgtgtggagggatggcgctgtgaggcggttgtgtgtggttttgtttggtgtgttttgtggcgagttggcgtgtgcgtgtgtgtgtgtgtgttggtctgagcgcgtcgattgcgttgcggtttgggtttgtgtctgggcgcttagctcaaatggtagagcgcccgcttcgcatgcgggaggtagggggatcgatacccccagtgtccactttttacggcacacaacactttttacgaacaaacactttttaccgcccctcgcgccgctgcttgcttcctagccttcctacccctgctcacccgccacccaagctcacccgccatctgcgagcgtgctggtgcctacgtttacagacgacccaccttttttgtcggcgagtgtggggcaaccacgccgactgccaggcgcaggatcccacaagagtttgggcatgagggagaccggctaaacagctcaccgagagcctggtcagcgccacagaccaaacgcccagctgtgtgctctgtgctctgtgctgtgtgtcacctctgtccgggccactggccggtcggacgagtagggttcgagtcagccagctgcttgacatttttgttttcggaggcgggtggctcccggcctggcggttcgaggcttcgggtatgtgaggcagtggaccatggcggagcgcggagaatcgacaaggcgtggatgctggcgcctcacgggtgctaatgtgctggtggagaggacgatcgttgtaatgggtgcggaggcttgcttggcgatgtgtggagggatggcgctgtgaggcggttgtgtgtggttttgtttggtgtgttttgtggcgagttggcgtgtgcgtgtgtgtgtctgtgtgttggtctgagcgcgtcgattgcgttgcggtttgggtttgtgtctgggcgcttagctcaaatggtagagcgcccgcttcgcatgcgggaggtagggggatcgatacccccagtgtccactttttacggcacacaacactttttacgaacaaacactttttaccgcccctcgcgccgctgcttgcttcctagccttcctacccctgctcacccgccacccacagctcacccgccatctgcgagcgtgctggtgcctacgtttacagacgacccaccttttttgtcggcgagtgtggggcaaccacgccgactgccaggtgcaggatcccacaaaagtttgggcatgagggagaccggctaaacagctcaccgagagcctggtcagcgccacagaccaaacgcccagctgtgtgctctgtgctctgtgctgtgtgtcacctctgtccgggccactggccggtcggacgagtagggttcgagtcagccagctgcttgacatttttgttttcggaggcgggtggctcccggcctggcggttcgaggcttcgggtatgtgaggcagtggaccatggcggagcgcggagaatcgacaaggcgtggatgctggcgcctcacgggtgctaatgtgctggtggagaggacgatcgttgtaatgggtgcggaggcttgcttggcgatgtgtggagggatggcgctgtgaggcggttgtgtgtggttttgtttggtgtgttttgtggcgagttggcgtgtgcgtgtgtgtgtgtgtgtgttggtctgagcgcgtcgattgcgttgcggtttgggtttgtgtctgggcgcttagctcaaatggtagagcgcccgcttcgcatgcgggaggtagggggatcgatacccccagtgtccactttttacggcacacaacactttttacgaacaaacactttttaccgcccctcgcgccgctgcttgcttcctagccttcctacccctgctcacccgccacccacagctcacccgccatctgcgagcgtgctggtgcctacgtttacagacgacccaccttttttgtcggcgagtgtggggcaaccacgccgactgccaggcgcaggatcccacaagagtttgggcatgagggagaccggctaaacagctcaccgagagcctggtcagcgccacagaccaaacgcccagctttgtgctgtgtgctctgtgctctgtgctgtgtgtcacctctgtccgggccactggccggtcggacgagtagggttcgagtcagccagctgcttgacatttttgttttcggaggcgggtggctcccggcctggcggttcgaggcttcgggtatgtgaggcagtggaccatggcggagcgcggagaatcgacaaggcgtggatgctggcgcctcacgggtgctaatgtgctggtggagaggacgatcgttgtaatgggtgcggaggcttgcttggcgatgtgtggagggatggcgctgtgaggcggttgtgtgtggttttgtttggtgtgttttgtggcgagttggcgtgtgcgtgtgtgtgtgtgtgtgtgttggtctgagcgcgtcgattgcgttgcggtttgggtttgtgtctgggcgcttagctcaaatggtagagcgcccgcttcgcatgcgggaggtagggggatcgatacccccagtgtccactttttacggcacacaacactttttacgaacaaacactttttaccgcccctcgcgccgctgcttgcttcctagccttcctacccctgctcacccgccacccacagctcacccgccatctgcgagcgtgctggtgcctacgtttacagacgacccaccttttttgtcggcgagtgtggggcaaccacgccgactgccaggcgcaggatcccacaagagtttgggcatgagggagaccggctaaacagctcaccgagagcctggtcagcgccacagaccaaacgcccagctttgtgctgtgtgctctgtgctctgtgctgtgtgtcacctctgtccgggccactggccggtcggacgagtagggttcgagtcagccagctgcttgacatttttgttttcggaggcgggtggctcccggcctggcggttcgaggcttcgggtatgtgaggcagtggaccatggcggagcgcggagaatcgacaaggcgtggatgctggcgcctcacgggtgctaatgtgctggtggagaggacgatcgttgtaatgggtgcggaggcttgcttggcgatgtgtggagggatggcgctgtgaggcggttgtgtgtggttttgtttggtgtgttttgtggcgagttggcgtgtgcgtgtgtgtgtgtgtgttggtctgagcgcgtcgattgcgttgcggtttgggtttgtgtctgggcgcttagctcaaatggtagagcgcccgcttcgcatgcgggaggtagggggatcgatacccccagtgtccactttttacggcacacaacactttttacgaacaaacactttttaccgcccctcgcgccgctgcttgcttcctagccttcctacccctgctcacccgccacccacagctcacccgccatctgcgagcgtgctggtgcctacgtttacagacgacccaccttttttgtcggcgagtgtggggcaaccacgccgactgccaggcgcaggatcccacaagagtttgggcatgagggagaccggctaaacagctcaccgagagcctggtcagcgccacagaccaaacgcccagctttgtgctgtgtgctctgtgctctgtgctgtgtgtcacctctgtccgggccactggccggtcggacgagtagggttcgagtcagccagctgcttgacatttttgttttcggaggcgggtggctcccggcctggcggttcgaggcttcgggtatgtgaggcagtggaccatggcggagcgcggagaatcgacaaggcgtggatgctggcgcctcacgggtgctaatgtgctggtggagaggacgatcgttgtaatgggtgcggaggcttgcttggcgatgtgtggagggatggcgctgtgaggcggttgtgtgtcgttttgtttggtgtgttttgtggcgagttggcgtgtgcgtgtgtgtgtgtgtgtgtgttggtctgagcgcgtcgattgcgttgcggtttgggtttgtgtctgggcgcttagctcaaatggtagagcgcccgcttcgcatgcgggaggtagggggatcgatacccccagtgtccactttttacggcacacaacactttttacgaacaaacactttttaccgcccctcgcgccgctgcttgcttcctagccttcctaaccctgctcacccgccacccacagctcacccgccatctgcgagcgtgctggtgcctacgtttacagacgacccaccttttttgtcggcgagtgtggggcaaccacgccgactgccaggcgcaggatcccacaagagtttgggcatgagggagaccggctaaacagctcaccgagagcctggtcagcgccacagaccaaacgcccagctttgtgctgtgtgctctgtgctctgtgctgtgtgtcacctctgtccgggccactggccggtcggacgagtagggttcgagtcagccagctgcttgacatttttgttttcggaggcgggtggctcccggcctggcggttcgaggcttcgggtatgtgaggcagtggaccatggcggagcgcggagaatcgacaaggcgtggatgctggcgcctcacgggtgctaatgtgctggtggagaggacgatcgttgtaatgggtgcggaggcttgcttggcgatgtgtggagggatggcgctgtgaggcggttgtgtgtcgttttgtttggtgtgttttgtggcgagttggcgtgtgcgtgtgtgtgtgtgtgtgttggtctgagcgcgtcgattgcgttgcggtttgggtttgtgtctgggcgcttagctcaaatggtagagcgcccgcttcgcatgcgggaggtaggggggtcgatacccccagtgtccactttttacggcacacaacactttttacgaacaaacactttttaccgcccctcgcgccgctgcttgcttcctagccttcctacccctgctcacccgccacccaagctcacccgccatctgcgagcgtgctggtgcctacgtttacagacgacccaccttttttgtcggcgagtgtggggcaaccacgccgactgccaggcgcaggatcccacaagagtttgggcatgagggagaccggctaaacagctcaccgagagcctggtcagcgccacagaccaaacgcccagctgtgtgctgtgtgctctgtgctctgtgctgtgtgtcacctctgtccgggccactggccggtcggacgagtagggttcgagtcagccagctgcttgacatttttgttttcggaggcgggtggctcccggcctggcggttcgaggcttcgggtatgtgaggcagtggaccatggcggagcgcggagaatcgacaaggcgtggatgctggcgcctcacgggtgctaatgtgctggtggagaggacgatcgttgtaatgggtgcggaggcttgcttggcgatgtgtggagggatgacgctgtgaggcggttgtgtgtggttttgtttggtgtgttttgtggcgagttggcgtgtgcgtgtgtgtgtgtgtgttggtctgagcgcgtcgattgcgttgcggtttgggtttgtgtctgggcgcttagctcaaatggtagagcgcccgcttcgcatgcgggaggtagggggatcgatacccccagtgtccactttttacggcacacaacactttttacgaacaaacactttttaccgcccctcgcgccgctgcttgcttcctagccttcctacccctgctcacccgccacccacagctcacccgccatctgcgagcgtgctggtgcctacgtttacagacgacccaccttttttgtcggcgagtgtggggcaaccacgccgactgccaggcgcaggatcccacaagagtttgggcatgagggagaccggctaaacagctcaccgagagcctggtcagcgccacagaccaaacgcccagctgtgtgctgtgtgctctgtgctctgtgctgtgtgtcacctctgtccgggcgggttcgagtcagccagctgcttgacatttttgttttcggaggcgggtggctcccggcctggcggttcgaggcttcgggtatgtgaggcagtggaccatggcggagcgcggagaatcgacaaggcgtggatgctggcgcctcacgggtgctaatgtgctggtggagaggacgatcgttgtaatgggtgcggaggcttgcttggcgatgtgtggagggatggcgctgtgaggcggttgtgtgtggttttgtttggtgtgttttgtggcgagttggcgtgtgcgtgtgtgtgtgtgtgttggtctgagcgcgtcgattgcgttgcggtttgggtttgtgtctgggcgcttagctcaaatggtagagcgcccgcttcgcatgcggatcgatacccccagtgtccacttttacggcacgcaacactttttacgaacaaacactttttaccgcccctcgcgccgctgcttgcttcctagccttcctacccctgctcacccgccacccacagctcacccgccatctgcgagcgtgctggtgcctacgtttacagacgacccaccttttttgtcggcgagtgtggggcaaccacgccgactgccaggcgcaggatcccacaagagtttgggcatgagggagaccggctaaacagctcaccgagagcctggtcagcgccacagaccaaacgcccagctgtgtgctgtgtgctctgtgctctgtgctgtgtgtcacctctgtccgggccactggccggtcggacgagtagggttcgagtcagccagctgcttgacatttttgttttcggaggcgggtggctcccggcctggcggttcgaggcttcgggtatgtgaggcagtggaccatggcggagcgcggagaatcgacaaggcgtggatgctggcgcctcacgggtgctaatgtgctggtggagaggacgatcgttgtaatgggtgcggaggcttgcttggcgatgtgtggagggatggcgctgtgaggcggttgtgtgtggttttgtttggtgtgttttgtggcgagttggcgtgtgcgtgtgtgtgtgtgtgttggtctgagcgcgtcgattgcgttgcggtttgggtttgtgtctgggcgcttagctcaaatggtagagcacccgcttcgcatgcggatcgatacccccagtgtccacttttacggcacacaacactttttacgaacaaccactttttaccgcccctcgcgccgctgcttgcttcctagccttcctacccctgctcacccgccacccacagctcacccgccatctgcgagcgtgctggtgcctacgtttacagacgacccaccttttttgtcggcgagtgtggggcaaccacgccgactgccaggcgcaggatcccacaagagtttgggcatgagggagaccggctaaacagctcaccgagagcctggtcagcgccacagaccaaacgcccagctgtgtgctgtgtgctctgtgctctgtgctgtgtgtcacctctgtccgggccactggccggtcggacgagtagggttcgagtcagccagctgcttgacatttttgtttccgaggcgggtggctcccggcctggcggttcgaggcttccggtatgtgaggcagtggaccatggcggagcgcggagaatcgacaaggcgtggatgctggcgcctcacgggtgctaatgtgctggtggagaggacgatcgttgtaatgggtgcggaggcttgcttggcgatgtgtggagggatggcgctgtgaggcggttgtgtgtggttttgtttggtgtgttttgtggcgagttggcgtgtgcgtgtgtgtgtgtgtgttggtctgagcgcgtcgattgcgttgcggtttgggtttgtgtctgggcgcttagctcaaatggtagagcgcccgcttcgcatgcgggaggtagggggatcgatacccccagtgtccactttttacggcacacaacactttttacgaacaaacactttttaccgcccctcgcgccgctgcttgcttcctagccttcctacccctgctcacccgccacccacagctcacccgccatctgcgagcgtgctggtgcctacgtttacagacgacccaccttttttgtcggcgagtgtggggcaaccacgccgactgccaggcgcaggatcccacaagagtttgggcatgagggagaccggctaaacagctcaccgagagcctggtcagcgccacagaccaaacgcccagctgtgtgctgtgtgctctgtgctctgtgctgtgtgtcacctctgtccgggccactggccggtcggacgagtagggttcgagtcagccagctgcttgacatttttgttttcggaggcgggtggctcccggcctggcggttcgaggcttcgggtatgtgaggcagtggaccatggcggagcgcggagaatcgacaaggcgtggatgctggcgcctcacgggtgctaatgtgctggtggagaggacgatcgttgtaatgggtgcggaggcttgcttggcgatgtgtggagggatggcgctgtgaggcggttgtgtgtggttttgtttggtgtgttttgtggcgagttggcgtgtgtgtgtgtgtgtgtgtgttggtctgagcgcgtcgattgcgttgcggtttgggtttgtgtctgggcgcttagctcaaatggtagagcgcccgcttcgcatgcgggaggtagggggatcgatacccccagtgtccactttttacggcacacaacactttttacgaacaaacactttttaccgcccctcgcgccgctgcttgcttcctagccttcctacccctgctcacccgccacccacagctcacccgccatctgcgagcgtgctggtgcctacgtttacagacgacccaccttttttgtcggcgagtgtggggcaaccacgccgactgccaggcgcaggatcccacaagagtttgggcatgagggagaccggctaaacagctcaccgagagcctggtcagcgccacagaccaaacgcccagctttgtgctgtgtgctctgtgctgtgtgctgtgtgtcacctctgtccgggccactggccggtcggacgagtagggttcgagtcagccagctgcttgacatttttgttttcggaggcgggtggctcccggcctggcggttcgaggcttcgggtatgtgaggcagtggaccatggcggagcgcggagaatcgacaaggcgtggatgctggcgcctcacgggtgctaatgtgctggtggagaggacgatcgttgtaatgggtgcggaggcttgcttggcgatgtgtggagggatggcgctgtgaggcggttgtgtgtcgttttgtttggtgtgttttgtggcgagttggcgtgtgcgtgtgtgtgtgtgtgtgttggtctgagcgcgtcgattgcgttgcggtttgggtttgtgtctgggcgcttagctcaaatggtagagcgcccgcttcgcatgcgggaggtagggggatcgatacccccagtgtccactttttacggcacacaacactttttacgaacaaacactttttaccgcccctcgcgccgctgcttgcttcctagccttcctacccctgctcacccgccacccaagctcacccgccatctgcgagcgtgctggtgcctacgtttacagacgacccaccttttttgtcggcgagtgtggggcaaccacgccgactgccaggcgcaggatcccacaagagtttgggcatgagggagaccggctaaacagctcaccgagagcctggtcagcgccacagaccaaacgcccagctgtgtgctgtgtgctctgtgctctgtgctgtgtgtcacctctgtccgggccactggccggtcggacgagtagggttcgagtcagccagctgcttgacatttttgttttcggaggcgggtggctcccggcctggcggttcgaggcttcgggtatgtgaggcagtggaccatggcggagcgcggagaatcgacaaggcgtggatgctggcgcctcacgggtgctaatgtgctggtggagaggacgatcgttgtaatgggtgcggaggcttgcttggcgatgtgtggagggatggcgctgtgaggcggttgtgtgtggttttgtttggtgtgttttgtggcgagttggcgtgtgcgtgtgtgtgtgtgtgtgttggtctgagcgcgtcgattgcgttgcggtttgggtttgtgtctgggcgcttagctcaaatggtagagcgcccgcttcgcatgcgggaggtagggggatcgatacccccagtgtccactttttacggcacacaacactttttacgaacaaacactttttaccgcccctcgcgccgctgcttgcttcctagccttcctacccctgctcacccgccacccacagctcacccgccatctgcgagcgtgctggtgcctacgtttacagacgacccaccttttttgtcggcgagtgtggggcaaccacgccgactgccaggcgcaggatcccacaagagtttgggcatgagggagaccggctaaacagctcaccgagagcctggtcagcgccacagaccaaacgcccagctgtgtgctgtgtgctctgtgctctgtgctgtgtgtcacctctgtccgggccactggccggtcggacgagtagggttcgagtcagccagctgcttgacatttttgttttcggaggcgggtggctcccggcctggcggttcgaggcttcgggtatgtgaggcagtggaccatggcggagcgcggagaatcgacaaggcgtggatgctggcgcctcacgggtgctaatgtgctggtggagaggacgatcgttgtaatgggtgcggaggcttgcttggcgatgtgtggagggatggcgctgtgaggcggttgtgtgtggttttgtttggtgtgttttgtggcgagttggcgtgtgcgtgtgtgtgtgtgtgtgttggtctgagcgcgtcgattgcgttgcggtttgggtttgtgtctgggcgcttagctcaaatggtagagcgcccgcttcgcatgcgggaggtagggggatcgatacccccagtgtccactttttacggcacacaacactttttacgaacaaacactttttaccgcccctcgcgccgctgcttgcttcctagccttcctacccctgctcacccgccacccaagctcacccgccatctgcgagcgtgctggtgcctacgtttacagacgacccaccttttttgtcggcgagtgtggggcaaccacgccgactgccaggcgcaggatcccacaagagtttgggcatgagggagaccggctaaacagctcaccgagagcctggtcagcgccacagaccaaacgcccagctgtgtgctgtgtgctctgtgctctgtgctgtgtgtcacctctgtccgggccactggccggtcggacgagtagggttcgagtcagccagctgcttgacatttttgtttcggaggcgggtggctcccggcctggcggttcgaggcttcgggtatgtgaggcagtggaccatggcggagcgcggagaatcgacaaggcgtggatgctggcgcctcacgggtgctaatgtgctggtggagaggacgatcgttgtaatgggtgcggaggcttgcttggcgatgtgtggagggatggcgctgtgaggcggttgtgtgtggttttgtttggtgtgttttgtggcgagttggcgtgtgcgtgtgtgtgtgtgtgttggtctgagcgcgtcgattgcgttgcggtttgggtttgtgtctgggcgcttagctcaaatggtagagcgcccgcttcgcatgcgggaggtagggggatcgatacccccagtgtccactttttacggcacacaacactttttacgaacaaacactttttaccgcccctcgcgccgctgcttgcttcctagccttcctacccctgctcacccgccacccacagctcacccgccatctgcgagcgtgctggtgcctacgtttacagacgacccaccttttttgtcggcgagtgtggggcaaccacgccgactgccaggcgcaggatcccacaagagtttgggcatgagggagaccggctaaacagctcaccgagagcctggtcagcgccacagaccaaacgcccagctgtgtgctgtgtgctctgtgctgtgtgtcacctctgtccgggccactggccggtcggacgagtagggttcgagtcagccagctgcttgacatttttgttttcggaggcgggtggctcccggcctggcggttcgaggcttcgggtatgtgaggcagtggaccatggcggagcgcggagaatcgacaaggcgtggatgctggcgcctcacgggtgctaatgtgctggtggagaggacgatcgttgtaatgggtgcggaggcttgcttggcgatgtgtggagggatggcgctgtgaggcgattgtgtgtggttttgtttggtgtgttttgtggcgagttggcgtgtgcgtgtgtgtgtgtgtgttggtctgagcgcgtcgattgcgttgcggtttgggtttgtgtctgggcgcttagctcaaatggtagagcgcccgcttcgcatgcgggaggtagggggatcgatacccccagtgtccactttttacggcacacaacactttttacgaacaaacactttttaccgcccctcgcgccgctgcttgcttcctagccttcctacccctgctcacccgccacccaagctcacccgccatctgcgagcgtgctggtgcctacgtttacagacgacccaccttttttgtcggcgagtgtggggcaaccacgccgactgccaggcgcaggatcccacaagagtttgggcatgagggagaccggctaaacagctcaccgagagcctggtcagcgccacagaccaaacgcccagctgtgtgctgtgtgctctgtgctgtgtgtcacctctgtccgggccactggccggtcggacgagtagggttcgagtcagccagctgcttgacatttttgtttcggaggcgggtggctcccggcctggcggttcgaggcttcgggtatgtgaggcagtggaccatggcggagcgcggagaatcgacaaggcgtggatgctggcgcctcacgggtgctaatgtgctggtggagaggacgatcgttgtaatgggtgcggaggcttgcttggcgatgtgtggagggatggcgctgtgaggcggttgtgtgtcgttttgtttggtgtgttttgtggcgagttggcgtgtgcgtgtgtgtgtgtgtgtgttggtctgagcgcgtcgattgcgttgcggtttgggtttgtgtctgggcgcttagctcaaatggtagagcgcccgcttcgcatgcgggaggtagggggatcgatacccccagtgtccactttttacggcacacaacactttttacgaacaaacactttttaccgcccctcgcgccgctgcttgcttcctagccttcctacccctgctcacccgccacccaagctcacccgccatctgcgagcgtgctggtgcctacgtttacagacgacccaccttttttgtcggcgagtgtggggcaaccacgccgactgccaggcgcaggatcccacaagagtttgggcatgagggagaccggctaaacagctcaccgagagcctggtcagcgccacagaccaaacgcccagctgtgtgctgtgtgctctgtgctctgtgctgtgtgtcacctctgtccgggccactggccggtcggacgagtagggttcgagtcagccagctgcttgacatttttgttttcggaggcgggtggctcccggcctggcggttcgaggcttcgggtatgtgaggcagtggaccatggcggagcgcggagaatcgacaaggcgtggatgctggcgcctcacgggtgctaatgtgctggtggagaggacgatcgttgtaatgggtgcggaggcttgcttggcgatgtgtggagggatggcgctgtgaggcggttgtgcgtcgttttgtttggtgtgttttgtggcgagttggcgtgtgcgtgtgtgtgtgtgtgtgttggtctgagcgcgtcgattgcgttgcggtttgggtttgtgtctgggcgcttagctcaaatggtagagcgcccgcttcgcatgcgggaggtaggggggtcgatacccccagtgtccactttttacggcacacaacactttttacgaacaaacactttttaccgcccctcgcgccgctgcttgcggggatcctnnnnnnnnnnnnnnnnnnnnnnnnnnnnnnnnnnnnnnnnnnnnnnnnnnnnnnnnnnnnnnnnnnnnnnnnnnnnnnnnnnnnnnnnnnnnnnnnnnnnnnnnnnnnnnnnnnnnnnnnnnnnnnnnnnnnnnnnnnnnnnnnnnnnnnnnnnnnnnnnnnnnnnnnnnnnnnnnnnnnnnnnnnnnnnnnnnnnnnnnnnnnnnnnnnnnnnnnnnnnnnnnnnnnnnnnnnnnnnnnnnnnnnnnnnnnnnnnnnnnnnnnnnnnnnnnnnnnnnnnnnnnnnnnnnnnnnnnnnnnnnnnnnnnnnnnnnnnnnnnnnnnnnnnnnnnnnnnnnnnnnnnnnnnnnnnnnnnnnnnnnnnnnnnnnnnnnnnnnnnnnnnnnnnnnnnnnnnnnnnnnnnnnnnnnnnnnnnnnnnnnnnnnnnnnnnnnnnnnnnnnnnnnnnnnnnnnnnnnnnnnnnnnnnnnnnnnnnnnnnnnnnnnnnnnnnnnnnnnnnnnnnnnnnnnnnnnnnnnnnnnnnnnnnnnnnnnnnnnnnnnnnnnnnnnnnnnnnnnnnnnnnnnnnnnnnnnnnnnnnnnnnnnnnnnnnnnnnnnnnnnnnnnnnnnnnnnnnnnnnnnnnnnnnnnnnnnnnnnnnnnnnnnnnnnnnnnnnnnnnnnnnnnnnnnnnnnnnnnnnnnnnnnnnnnnnnnnnnnnnnnnnnnnnnnnnnnnnnnnnnnnnnnnnnnnnnnnnnnnnnnnnnnnnnnnnnnnnnnnnnnnnnnnnnnnnnnnnnnnnnnnnnnnnnnnnnnnnnnnnnnnnnnnnnnnnnnnnnnnnnnnnnnnnnnnnnnnnnnnnnnnnnnnnnnnnnnnnnnnnnnnnnnnnnnnnnnnnnnnnnnnnnnnnnnnnnnnnnnnnnnnnnnnnnnnnnnnnnnnnnnnnnnnnnnnnnnnnnnnnnnnnnnnnnnnnnnnnnnnnnnnnnnnnnnnnnnnnnnnnnnnnnnnnnnnnnnnnnnnnnnnnnnnnnnnnnnnnnnnnnnnnnnnnnnnnnnnnnnnnnnnnnnnnnnnnnnnnnnnnnnnnnnnnnnnnnnnnnnnnnnnnnnnnnnnnnnnnnnnnnnnnnnnnnnnnnnnnnnnnnnnnnnnnnnnnnnnnnnnnnnnnnnnnnnnnnnnnnnnnnnnnnnnnnnnnnnnnnnnnnnnnnnnnnnnnnnnnnnnnnnnnnnnnnnnnnnnnnnnnnnnnnnnnnnnnnnnnnnnnnnnnnnnnnnnnnnnnnnnnnnnnnnnnnnnnnnnnnnnnnnnnnnnnnnnnnnnnnnnnnnnnnnnnnnnnnnnnnnnnnnnnnnnnnnnnnnnnnnnnnnnnnnnnnnnnnnnnnnnnnnnnnnnnnnnnnnnnnnnnnnnnnnnnnnnnnnnnnnnnnnnnnnnnnnnnnnnnnnnnnnnnnnnnnnnnnnnnnnnnnnnnnnnnnnnnnnnnnnnnnnnnnnnnnnnnnnnnnnnnnnnnnnnnnnnnnnnnnnnnnnnnnnnnnnnnnnnnnnnnnnnnnnnnnnnnnnnnnnnnnnnnnnnnnnnnnnnnnnnnnnnnnnnnnnnnnnnnnnnnnnnnnnnnnnnnnnnnnnnnnnnnnnnnnnnnnnnnnnnnnnnnnnnnnnnnnnnnnnnnnnnnnnnnnnnnnnnnnnnnnnnnnnnnnnnnnnnnnnnnnnnnnnnnnnnnnnnnnnnnnnnnnnnnnnnnnnnnnnnnnnnnnnnnnnnnnnnnnnnnnnnnnnnnnnnnnnnnnnnnnnnnnnnnnnnnnnnnnnnnnnnnnnnnnnnnnnnnnnnnnnnnnnnnnnnnnnnnnnnnnnnnnnnnnnnnnnnnnnnnnnnnnnnnnnnnnnnnnnnnnnnnnnnnnnnnnnnnnnnnnnnnnnnnnnnnnnnnnnnnnnnnnnnnnnnnnnnnnnnnnnnnnnnnnnnnnnnnnnnnnnnnnnnnnnnnnnnnnnnnnnnnnnnnnnnnnnnnnnnnnnnnnnnnnnnnnnnnnnnnnnnnnnnnnnnnnnnnnnnnnnnnnnnnnnnnnnnnnnnnnnnnnnnnnnnnnnnnnnnnnnnnnnnnnnnnnnnnnnnnnnnnnnnnnnnnnnnnnnnnnnnnnnnnnnnnnnnnnnnnnnnnnnnnnnnnnnnnnnnnnnnnnnnnnnnnnnnnnnnnnnnnnnnnnnnnnnnnnnnnnnnnnnnnnnnnnnnnnnnnnnnnnnnnnnnnnnnnnnnnnnnnnnnnnnnnnnnnnnnnnnnnnnnnnnnnnnnnnnnnnnnnnnnnnnnnnnnnnnnnnnnnnnnnnnnnnnnnnnnnnnnnnnnnnnnnnnnnnnnnnnnnnnnnnnnnnnnnnnnnnnnnnnnnnnnnnnnnnnnnnnnnnnnnnnnnnnnnnnnnnnnnnnnnnnnnnnnnnnnnnnnnnnnnnnnnnnnnnnnnnnnnnnnnnnnnnnnnnnnnnnnnnnnnnnnnnnnnnnnnnnnnnnnnnnnnnnnnnnnnnnnnnnnnnnnnnnnnnnnnnnnnnnnnnnnnnnnnnnnnnnnnnnnnnnnnnnnnnnnnnnnnnnnnnnnnnnnnnnnnnnnnnnnnnnnnnnnnnnnnnnnnnnnnnnnnnnnnnnnnnnnnnnnnnnnnnnnnnnnnnnnnnnnnnnnnnnnnnnnnnnnnnnnnnnnnnnnnnnnnnnnnnnnnnnnnnnnnnnnnnnnnnnnnnnnnnnnnnnnnnnnnnnnnnnnnnnnnnnnnnnnnnnnnnnnnnnnnnnnnnnnnnnnnnnnnnnnnnnnnnnnnnnnnnnnnnnnnnnnnnnnnnnnnnnnnnnnnnnnnnnnnnnnnnnnnnnnnnnnnnnnnnnnnnnnnnnnnnnnnnnnnnnnnnnnnnnnnnnnnnnnnnnnnnnnnnnnnnnnnnnnnnnnnnnnnnnnnnnnnnnnnnnnnnnnnnnnnnnnnnnnnnnnnnnnnnnnnnnnnnnnnnnnnnnnnnnnnnnnnnnnnnnnnnnnnnnnnnnnnnnnnnnnnnnnnnnnnnnnnnnnnnnnnnnnnnnnnnnnnnnnnnnnnnnnnnnnnnnnnnnnnnnnnnnnnnnnnnnnnnnnnnnnnnnnnnnnnnnnnnnnnnnnnnnnnnnnnnnnnnnnnnnnnnnnnnnnnnnnnnnnnnnnnnnnnnnnnnnnnnnnnnnnnnnnnnnnnnnnnnnnnnnnnnnnnnnnnnnnnnnnnnnnnnnnnnnnnnnnnnnnnnnnnnnnnnnnnnnnnnnnnnnnnnnnnnnnnnnnnnnnnnnnnnnnnnnnnnnnnnnnnnnnnnnnnnnnnnnnnnnnnnnnnnnnnnnnnnnnnnnnnnnnnnnnnnnnnnnnnnnnnnnnnnnnnnnnnnnnnnnnnnnnnnnnnnnnnnnnnnnnnnnnnnnnnnnnnnnnnnnnnnnnnnnnnnnnnnnnnnnnnnnnnnnnnnnnnnnnnnnnnnnnnnnnnnnnnnnnnnnnnnnnnnnnnnnnnnnnnnnnnnnnnnnnnnnnnnnnnnnnnnnnnnnnnnnnnnnnnnnnnnnnnnnnnnnnnnnnnnnnnnnnnnnnnnnnnnnnnnnnnnnnnnnnnnnnnnnnnnnnnnnnnnnnnnnnnnnnnnnnnnnnnnnnnnnnnnnnnnnnnnnnnnnnnnnnnnnnnnnnnnnnnnnnnnnnnnnnnnnnnnnnnnnnnnnnnnnnnnnnnnnnnnnnnnnnnnnnnnnnnnnnnnnnnnnnnnnnnnnnnnnnnnnnnnnnnnnnnnnnnnnnnnnnnnnnnnnnnnnnnnnnnnnnnnnnnnnnnnnnnnnnnnnnnnnnnnnnnnnnnnnnnnnnnnnnnnnnnnnnnnnnnnnnnnnnnnnnnnnnnnnnnnnnnnnnnnnnnnnnnnnnnnnnnnnnnnnnnnnnnnnnnnnnnnnnnnnnnnnnnnnnnnnnnnnnnnnnnnnnnnnnnnnnnnnnnnnnnnnnnnnnnnnnnnnnnnnnnnnnnnnnnnnnnnnnnnnnnnnnnnnnnnnnnnnnnnnnnnnnnnnnnnnnnnnnnnnnnnnnnnnnnnnnnnnnnnnnnnnnnnnnnnnnnnnnnnnnnnnnnnnnnnnnnnnnnnnnnnnnnnnnnnnnnnnnnnnnnnnnnnnnnnnnnnnnnnnnnnnnnnnnnnnnnnnnnnnnnnnnnnnnnnnnnnnnnnnnnnnnnnnnnnnnnnnnnnnnnnnnnnnnnnnnnnnnnnnnnnnnnnnnnnnnnnnnnnnnnnnnnnnnnnnnnnnnnnnnnnnnnnnnnnnnnnnnnnnnnnnnnnnnnnnnnnnnnnnnnnnnnnnnnnnnnnnnnnnnnnnnnnnnnnnnnnnnnnnnnnnnnnnnnnnnnnnnnnnnnnnnnnnnnnnnnnnnnnnnnnnnnnnnnnnnnnnnnnnnnnnnnnnnnnnnnnnnnnnnnnnnnnnnnnnnnnnnnnnnnnnnnnnnnnnnnnnnnnnnnnnnnnnnnnnnnnnnnnnnnnnnnnnnnnnnnnnnnnnnnnnnnnnnnnnnnnnnnnnnnnnnnnnnnnnnnnnnnnnnnnnnnnnnnnnnnnnnnnnnnnnnnnnnnnnnnnnnnnnnnnnnnnnnnnnnnnnnnnnnnnnnnnnnnnnnnnnnnnnnnnnnnnnnnnnnnnnnnnnnnnnnnnnnnnnnnnnnnnnnnnnnnnnnnnnnnnnnnnnnnnnnnnnnnnnnnnnnnnnnnnnnnnnnnnnnnnnnnnnnnnnnnnnnnnnnnnnnnnnnnnnnnnnnnnnnnnnnnnnnnnnnnnnnnnnnnnnnnnnnnnnnnnnnnnnnnnnnnnnnnnnnnnnnnnnnnnnnnnnnnnnnnnnnnnnnnnnnnnnnnnnnnnnnnnnnnnnnnnnnnnnnnnnnnnnnnnnnnnnnnnnnnnnnnnnnnnnnnnnnnnnnnnnnnnnnnnnnnnnnnnnnnnnnnnnnnnnnnnnnnnnnnnnnnnnnnnnnnnnnnnnnnnnnnnnnnnnnnnnnnnnnnnnnnnnnnnnnnnnnnnnnnnnnnnnnnnnnnnnnnnnnnnnnnnnnnnnnnnnnnnnnnnnnnnnnnnnnnnnnnnnnnnnnnnnnnnnnnnnnnnnnnnnnnnnnnnnnnnnnnnnnnnnnnnnnnnnnnnnnnnnnnnnnnnnnnnnnnnnnnnnnnnnnnnnnnnnnnnnnnnnnnnnnnnnnnnnnnnnnnnnnnnnnnnnnnnnnnnnnnnnnnnnnnnnnnnnnnnnnnnnnnnnnnnnnnnnnnnnnnnnnnnnnnnnnnnnnnnnnnnnnnnnnnnnnnnnnnnnnnnnnnnnnnnnnnnnnnnnnnnnnnnnnnnnnnnnnnnnnnnnnnnnnnnnnnnnnnnnnnnnnnnnnnnnnnnnnnnnnnnnnnnnnnnnnnnnnnnnnnnnnnnnnnnnnnnnnnnnnnnnnnnnnnnnnnnnnnnnnnnnnnnnnnnnnnnnnnnnnnnnnnnnnnnnnnnnnnnnnnnnnnnnnnnnnnnnnnnnnnnnnnnnnnnnnnnnnnnnnnnnnnnnnnnnnnnnnnnnnnnnnnnnnnnnnnnnnnnnnnnnnnnnnnnnnnnnnnnnnnnnnnnnnnnnnnnnnnnnnnnnnnnnnnnnnnnnnnnnnnnnnnnnnnnnnnnnnnnnnnnnnnnnnnnnnnnnnnnnnnnnnnnctaatgtgctggtggagaggacgatcgttgtaatgggtgcggaggcttgcttggcgatgtgtggagggatggcgctgtgaggcggttgtgtgtcattttgtttggtgtgttttgtggcgagttggcgtgtgcgtgtgtgtgtgtgtgtgttggtctgagcgcgtcgattgcgttgcggtttgggtttgtgtctgggcgcttagctcaaatggtagagcgcccgcttcgcatgcgggaggtagggggatcgatacccccagtgtccactttttacggcacacaacactttttacgaacaaacactttttaccgcccctcgcgccgctgcttgcttcctagccttcctacccctgctcacccgccacccacagctcacccgccatctgcgagcgtgctggtgcctacgtttacagacgacccaccttttttgtcggcgagtgtggggcaaccacgccgactgccaggcgcaggatcccacaagagtttgggcatgagggagaccggctaaacagctcaccgagagcctggtcagcgccacagaccaaacgcccagctgtgtgctgtgtgctctgtgctctgtgctgtgtgtcacctctgtccgggccactggccggtcggacgagtagggttcgagtcagccagctgcttgacatttttgttttcggaggcgggtggctcccggcctggcggttcgaggcttcgggtatgtgaggcagtggaccatggcggagcgcggagaatcgacaaggcgtggatgctggcgcctcacgggtgctaatgtgctggtggagaggacgatcgttgtaatgggtgcggaggcttgcttggcgatgtgtggagggatggcgctgtgaggcggttgtgtgtcattttgtttggtgtgttttgtggcgagttggcgtgtgcgtgtgtgtgtgtgtgtgttggtctgagcgcgtcgattgcgttgcggtttgggtttgtgtctgggcgcttagctcaaatggtagagcgcccgcttcgcatgcgggaggtagggggatcgatacccccagtgtccactttttacggcacacaacactttttacgaacaaacactttttaccgcccctcgcgccgctgcttgcttcctagccttcctacccctgctcacccgccacccacagctcacccgccatctgcgagcgtgctggtgcctacgtttacagacgacccaccttttttgtcggcgagtgtggggcaaccacgccgactgccaggcgcaggatcccacaagagtttgggcatgagggagaccggctaaacagctcaccgagagcctggtcagcgccacagaccaaacgcccagctgtgtgctgtgtgctctgtgctctgtgctgtgtgtcacctctgtccgggccactggccggtcggacgagtagggttcgagtcagccagctgcttgacatttttgttttcggaggcgggtggctcccggcctggcggttcgaggcttcgggtatgtgaggcagtggaccatggcggagcgcggagaatcgacaaggcgtggatgctggcgcctcacgggtgctaatgtgctggtggagaggacgatcgttgtaatgggtgcggaggcttgcttggcgatgtgtggagggatggcgctgtgaggcggttgtgcgtcgttttgtttggtgtgttttgtggcgagttggcgtgtgcgtgtgtgtgtgtgtgttggtctgagcgcgtcgattgcgttgcggtttgggtttgtgtctgggcgcttagctcaaatggtagagcgcccgcttcgcatgcgggaggtagggggatcgatacccccagtgtccacttttacggcacacaacactttttacgaacaaacactttttaccgcccctcgcgccgctgcttgcttcctagccttcctacccctgctcacccgccacccacagctcacccgccatctgcgagcgtgctggtgcctacgtttacagacgacccaccttttttgtcggcgagtgtggggcaaccacgccgactgccaggcgcaggatcccacaagagtttgggcatgagggagaccggctaaacagctcaccgagagcctggtcagcgccacagaccaaacgcccagctgtgtgctgtgtgctctgtgctctgtgctgtgtgtcacctctgtccgggccactggccggtcggacgagtagggttcgagtcagccagctgcttgacatttttgttttcggaggcgggtggctcccggcctggcggttcgaggcttcgggtatgtgaggcagtggaccatggcggagcgcggagaatcgacaaggcgtggatgctggcgcctcacgggtgctaatgtgctggtggagaggacgatcgttgtaatgggtgcggaggcttgcttggcgatgtgtggagggatgacgctgtgaggcggttgtgtgtcgttttgtttggtgtgttttgtggcgagttggcgtgtgcgtgtgtgtgtgtgtgtgttggtctgagcgcgtcgattgcgttgcggtttgggtttgtgtctgggcgcttagctcaaatggtagagcgcccgcttcgcatgcgggaggtagggggatcgatacccccagtctccactttttacggcacacaacactttttacgaacaaacactttttaccgcccctcgcgccgctgcttgcttcctagccttcctacccctgctcacccgccacccaagctcacccgccatctgcgagcgtgctggtgcctacgtttacagacgacccaccttttttgtcggcgagtgtggggcaaccacgccgactgccaggcgcaggatcccacaagagtttgggcatgagggagaccggctaaacagctcaccgagagcctggtcagcgccacagaccaaacgcccagctttgtgctgtgtgctctgtgctctgtgctgtgtgtcacctctgtccgggccactggccggtcggacgagtagggttcgagtcagccagctgcttgacatttttgttttcggaggcgggtggctcccggcctggcggttcgaggcttcgggtatgtgaggcagtggaccatggcggagcgcggagaatcgacaaggcgtggatgctggcgcctcacgggtgctaatgtgctggtggagaggacgatcgttgtaatgggtgcggaggcttgcttggcgatgtgtggagggatggcgctgtgaggcggttgtgtgtcgttttgtttggtgtgttttgtggcgagttggcgtgtgcgtgtgtgtgtgtgtgttggtctgagcgcgtcgattgcgttgcggtttgggtttgtgtctgggcgcttagctcaaatggtagagcgcccgcttcgcatgcgggaggtagggggatcgatacccccagtgtccactttttacggcacacaacactttttacgaacaaacactttttaccgcccctcgcgccgctgcttgcttcctagccttcctacccctgctcacccgccacccaagctcacccgccatctgcgagcgtgctggtgcctacgtttacagacgacccaccttttttgtcggcgagtgtggggcaaccacgccgactgccaggcgcaggatcccacaagagtttgggcatgagggagaccggctaaacagctcaccgagagcctggtcagcgccacagaccaaacgcccagctgtgtgctgtgtgctctgtgctctgtgctgtgtgtcacctctgtccgggcgggttcgagtcagccagctgcttgacatttttgttttcggaggcgggtggctcccggcctggcggttcgaggcttcgggtatgtgaggcagtggaccatggcggagcgcggagaatcgacaaggcgtggatgctggcgcctcacgggtgctaatgtgctggtggagaggacgatcgttgtaatgggtgcggaggcttgcttggcgatgtgtggagggatggcgctgtgaggcggttgtgcgtcgttttgtttggtgtgttttgtggcgagttggcgtgtgcgtgcgtgtgtgtgtgttgatctgagcgcgtcgattgcgttgcggtttgggtttgtgtctgggcgcttagctcaaatggtagagcacccgcttcgcatgcggatcgatacccccagtgtccacttttacggcacacaacactttttacgaacaaacactttttaccgcccctcgcgccgctgcttgcttcctagccttcctacccctgctcacccgccacccacagctcacccgccatctgcgagcgtgctggtgcctacgtttacagacgacccaccttttttgtcggcgagtgtggggcaaccacgccgactgccaggcgcaggatcccacaagagtttgggcatgagggagaccggctaaacagctcaccgagagcctggtcagcgccacagaccaaacgcccagctgtgtgctgtgtgctctgtgctctgtgctgtgtgtcacctctgtccgggccactggccggtcggacgagtagggttcgagtcagccagctgcttgacatttttgttttcggaggcgggtggctcccggcctggcggttcgaggcttcgggtatgtgaggcagtggaccatggcggagcgcggagaatcgacaaggcgtggatgctggcgcctcacgggtgctaatgtgctggtggagaggacgatcgttgtaatgggtgcggaggcttgcttggcgatgtgtggagggatggcgctgtgaggcgattgtgtgtcgttttgtttggtgtgttttgtggcgagttggcgtgtgcgtgtgtgtgtgtgtgttggtctgagcgcgtcgattgcgttgcggtttgggtttgtgtctgggcgcttagctcaaatggtagagcgcccgcttcgcatgcgggaggtagggggatcgatacccccagtgtccacttttnnnnnnnnnnnnnnnnnnnnnnnnnnnnnnnnnnnnnnnnnnnnnnnnnnnnnnnnnnnnnnnnnnnnnnnnnnnnnnnnnnnnnnnnnnnnnnnnnnnnnnnnnnnnnnnnnnnnnnnnnnnnnnnnnnnnnnnnnnnnnnnnnnnnnnnnnnnnnnnnnnnnnnnnnnnnnnnnnnnnnnnnnnnnnnnnnnnnnnnnnnnnnnnnnnnnnnnnnnnnnnnnnnnnnnnnnnnnnnnnnnnnnnnnnnnnnnnnnnnnnnnnnnnnnnnnnnnnnnnnnnnnnnnnnnnnnnnnnnnnnnnnnnnnnnnnnnnnnnnnnnnnnnnnnnnnnnnnnnnnnnnnnnnnnnnnnnnnnnnnnnnnnnnnnnnnnnnnnnnnnnnnnnnnnnnnnnnnnnnnnnnnnnnnnnnnnnnnnnnnnnnnnnnnnnnnnnnnnnnnnnnnnnnnnnnnnnnnnnnnnnnnnnnnnnnnnnnnnnnnnnnnnnnnnnnnnnnnnnnnnnnnnnnnnnnnnnnnnnnnnnnnnnnnnnnnnnnnnnnnnnnnnnnnnnnnnnnnnnnnnnnnnnnnnnnnnnnnnnnnnnnnnnnnnnnnnnnnnnnnnnnnnnnnnnnnnnnnnnnnnnnnnnnnnnnnnnnnnnnnnnnnnnnnnnnnnnnnnnnnnnnnnnnnnnnnnnnnnnnnnnnnnnnnnnnnnnnnnnnnnnnnnnnnnnnnnnnnnnnnnnnnnnnnnnnnnnnnnnnnnnnnnnnnnnnnnnnnnnnnnnnnnnnnnnnnnnnnnnnnnnnnnnnnnnnnnnnnnnnnnnnnnnnnnnnnnnnnnnnnnnnnnnnnnnnnnnnnnnnnnnnnnnnnnnnnnnnnnnnnnnnnnnnnnnnnnnnnnnnnnnnnnnnnnnnnnnnnnnnnnnnnnnnnnnnnnnnnnnnnnnnnnnnnnnnnnnnnnnnnnnnnnnnnnnnnnnnnnnnnnnnnnnnnnnnnnnnnnnnnnnnnnnnnnnnnnnnnnnnnnnnnnnnnnnnnnnnnnnnnnnnnnnnnnnnnnnnnnnnnnnnnnnnnnnnnnnnnnnnnnnnnnnnnnnnnnnnnnnnnnnnnnnnnnnnnnnnnnnnnnnnnnnnnnnnnnnnnnnnnnnnnnnnnnnnnnnnnnnnnnnnnnnnnnnnnnnnnnnnnnnnnnnnnnnnnnnnnnnnnnnnnnnnnnnnnnnnnnnnnnnnnnnnnnnnnnnnnnnnnnnnnnnnnnnnnnnnnnnnnnnnnnnnnnnnnnnnnnnnnnnnnnnnnnnnnnnnnnnnnnnnnnnnnnnnnnnnnnnnnnnnnnnnnnnnnnnnnnnnnnnnnnnnnnnnnnnnnnnnnnnnnnnnnnnnnnnnnnnnnnnnnnnnnnnnnnnnnnnnnnnnnnnnnnnnnnnnnnnnnnnnnnnnnnnnnnnnnnnnnnnnnnnnnnnnnnnnnnnnnnnnnnnnnnnnnnnnnnnnnnnnnnnnnnnnnnnnnnnnnnnnnnnnnnnnnnnnnnnnnnnnnnnnnnnnnnnnnnnnnnnnnnnnnnnnnnnnnnnnnnnnnnnnnnnnnnnnnnnnnnnnnnnnnnnnnnnnnnnnnnnnnnnnnnnnnnnnnnnnnnnnnnnnnnnnnnnnnnnnnnnnnnnnnnnnnnnnnnnnnnnnnnnnnnnnnnnnnnnnnnnnnnnnnnnnnnnnnnnnnnnnnnnnnnnnnnnnnnnnnnnnnnnnnnnnnnnnnnnnnnnnnnnnnnnnnnnnnnnnnnnnnnnnnnnnnnnnnnnnnnnnnnnnnnnnnnnnnnnnnnnnnnnnnnnnnnnnnnnnnnnnnnnnnnnnnnnnnnnnnnnnnnnnnnnnnnnnnnnnnnnnnnnnnnnnnnnnnnnnnnnnnnnnnnnnnnnnnnnnnnnnnnnnnnnnnnnnnnnnnnnnnnnnnnnnnnnnnnnnnnnnnnnnnnnnnnnnnnnnnnnnnnnnnnnnnnnnnnnnnnnnnnnnnnnnnnnnnnnnnnnnnnnnnnnnnnnnnnnnnnnnnnnnnnnnnnnnnnnnnnnnnnnnnnnnnnnnnnnnnnnnnnnnnnnnnnnnnnnnnnnnnnnnnnnnnnnnnnnnnnnnnnnnnnnnnnnnnnnnnnnnnnnnnnnnnnnnnnnnnnnnnnnnnnnnnnnnnnnnnnnnnnnnnnnnnnnnnnnnnnnnnnnnnnnnnnnnnnnnnnnnnnnnnnnnnnnnnnnnnnnnnnnnnnnnnnnnnnnnnnnnnnnnnnnnnnnnnnnnnnnnnnnnnnnnnnnnnnnnnnnnnnnnnnnnnnnnnnnnnnnnnnnnnnnnnnnnnnnnnnnnnnnnnnnnnnnnnnnnnnnnnnnnnnnnnnnnnnnnnnnnnnnnnnnnnnnnnnnnnnnnnnnnnnnnnnnnnnnnnnnnnnnnnnnnnnnnnnnnnnnnnnnnnnnnnnnnnnnnnnnnnnnnnnnnnnnnnnnnnnnnnnnnnnnnnnnnnnnnnnnnnnnnnnnnnnnnnnnnnnnnnnnnnnnnnnnnnnnnnnnnnnnnnnnnnnnnnnnnnnnnnnnnnnnnnnnnnnnnnnnnnnnnnnnnnnnnnnnnnnnnnnnnnnnnnnnnnnnnnnnnnnnnnnnnnnnnnnnnnnnnnnnnnnnnnnnnnnnnnnnnnnnnnnnnnnnnnnnnnnnnnnnnnnnnnnnnnnnnnnnnnnnnnnnnnnnnnnnnnnnnnnnnnnnnnnnnnnnnnnnnnnnnnnnnnnnnnnnnnnnnnnnnnnnnnnnnnnnnnnnnnnnnnnnnnnnnnnnnnnnnnnnnnnnnnnnnnnnnnnnnnnnnnnnnnnnnnnnnnnnnnnnnnnnnnnnnnnnnnnnnnnnnnnnnnnnnnnnnnnnnnnnnnnnnnnnnnnnnnnnnnnnnnnnnnnnnnnnnnnnnnnnnnnnnnnnnnnnnnnnnnnnnnnnnnnnnnnnnnnnnnnnnnnnnnnnnnnnnnnnnnnnnnnnnnnnnnnnnnnnnnnnnnnnnnnnnnnnnnnnnnnnnnnnnnnnnnnnnnnnnnnnnnnnnnnnnnnnnnnnnnnnnnnnnnnnnnnnnnnnnnnnnnnnnnnnnnnnnnnnnnnnnnnnnnnnnnnnnnnnnnnnnnnnnnnnnnnnnnnnnnnnnnnnnnnnnnnnnnnnnnnnnnnnnnnnnnnnnnnnnnnnnnnnnnnnnnnnnnnnnnnnnnnnnnnnnnnnnnnnnnnnnnnnnnnnnnnnnnnnnnnnnnnnnnnnnnnnnnnnnnnnnnnnnnnnnnnnnnnnnnnnnnnnnnnnnnnnnnnnnnnnnnnnnnnnnnnnnnnnnnnnnnnnnnnnnnnnnnnnnnnnnnnnnnnnnnnnnnnnnnnnnnnnnnnnnnnnnnnnnnnnnnnnnnnnnnnnnnnnnnnnnnnnnnnnnnnnnnnnnnnnnnnnnnnnnnnnnnnnnnnnnnnnnnnnnnnnnnnnnnnnnnnnnnnnnnnnnnnnnnnnnnnnnnnnnnnnnnnnnnnnnnnnnnnnnnnnnnnnnnnnnnnnnnnnnnnnnnnnnnnnnnnnnnnnnnnnnnnnnnnnnnnnnnnnnnnnnnnnnnnnnnnnnnnnnnnnnnnnnnnnnnnnnnnnnnnnnnnnnnnnnnnnnnnnnnnnnnnnnnnnnnnnnnnnnnnnnnnnnnnnnnnnnnnnnnnnnnnnnnnnnnnnnnnnnnnnnnnnnnnnnnnnnnnnnnnnnnnnnnnnnnnnnnnnnnnnnnnnnnnnnnnnnnnnnnnnnnnnnnnnnnnnnnnnnnnnnnnnnnnnnnnnnnnnnnnnnnnnnnnnnnnnnnnnnnnnnnnnnnnnnnnnnnnnnnnnnnnnnnnnnnnnnnnnnnnnnnnnnnnnnnnnnnnnnnnnnnnnnnnnnnnnnnnnnnnnnnnnnnnnnnnnnnnnnnnnnnnnnnnnnnnnnnnnnnnnnnnnnnnnnnnnnnnnnnnnnnnnnnnnnnnnnnnnnnnnnnnnnnnnnnnnnnnnnnnnnnnnnnnnnnnnnnnnnnnnnnnnnnnnnnnnnnnnnnnnnnnnnnnnnnnnnnnnnnnnnnnnnnnnnnnnnnnnnnnnnnnnnnnnnnnnnnnnnnnnnnnnnnnnnnnnnnnnnnnnnnnnnnnnnnnnnnnnnnnnnnnnnnnnnnnnnnnnnnnnnnnnnnnnnnnnnnnnnnnnnnnnnnnnnnnnnnnnnnnnnnnnnnnnnnnnnnnnnnnnnnnnnnnnnnnnnnnnnnnnnnnnnnnnnnnnnnnnnnnnnnnnnnnnnnnnnnnnnnnnnnnnnnnnnnnnnnnnnnnnnnnnnnnnnnnnnnnnnnnnnnnnnnnnnnnnnnnnnnnnnnnnnnnnnnnnnnnnnnnnnnnnnnnnnnnnnnnnnnnnnnnnnnnnnnnnnnnnnnnnnnnnnnnnnnnnnnnnnnnnnnnnnnnnnnnnnnnnnnnnnnnnnnnnnnnnnnnnnnnnnnnnnnnnnnnnnnnnnnnnnnnnnnnnnnnnnnnnnnnnnnnnnnnnnnnnnnnnnnnnnnnnnnnnnnnnnnnnnnnnnnnnnnnnnnnnnnnnnnnnnnnnnnnnnnnnnnnnnnnnnnnnnnnnnnnnnnnnnnnnnnnnnnnnnnnnnnnnnnnnnnnnnnnnnnnnnnnnnnnnnnnnnnnnnnnnnnnnnnnnnnnnnnnnnnnnnnnnnnnnnnnnnnnnnnnnnnnnnnnnnnnnnnnnnnnnnnnnnnnnnnnnnnnnnnnnnnnnnnnnnnnnnnnnnnnnnnnnnnnnnnnnnnnnnnnnnnnnnnnnnnnnnnnnnnnnnnnnnnnnnnnnnnnnnnnnnnnnnnnnnnnnnnnnnnnnnnnnnnnnnnnnnnnnnnnnnnnnnnnnnnnnnnnnnnnnnnnnnnnnnnnnnnnnnnnnnnnnnnnnnnnnnnnnnnnnnnnnnnnnnnnnnnnnnnnnnnnnnnnnnnnnnnnnnnnnnnnnnnnnnnnnnnnnnnnnnnnnnnnnnnnnnnnnnnnnnnnnnnnnnnnnnnnnnnnnnnnnnnnnnnnnnnnnnnnnnnnnnnnnnnnnnnnnnnnnnnnnnnnnnnnnnnnnnnnnnnnnnnnnnnnnnnnnnnnnnnnnnnnnnnnnnnnnnnnnnnnnnnnnnnnnnnnnnnnnnnnnnnnnnnnnnnnnnnnnnnnnnnnnnnnnnnnnnnnnnnnnnnnnnnnnnnnnnnnnnnnnnnnnnnnnnnnnnnnnnnnnnnnnnnnnnnnnnnnnnnnnnnnnnnnnnnnnnnnnnnnnnnnnnnnnnnnnnnnnnnnnnnnnnnnnnnnnnnnnnnnnnnnnnnnnnnnnnnnnnnnnnnnnnnnnnnnnnnnnnnnnnnnnnnnnnnnnnnnnnnnnnnnnnnnnnnnnnnnnnnnnnnnnnnnnnnnnnnnnnnnnnnnnnnnnnnnnnnnnnnnnnnnnnnnnnnnnnnnnnnnnnnnnnnnnnnnnnnnnnnnnnnnnnnnnnnnnnnnnnnnnnnnnnnnnnnnnnnnnnnnnnnnnnnnnnnnnnnnnnnnnnnnnnnnnnnnnnnnnnnnnnnnnnnnnnnnnnnnnnnnnnnnnnnnnnnnnnnnnnnnnnnnnnnnnnnnnnnnnnnnnnnnnnnnnnnnnnnnnnnnnnnnnnnnnnnnnnnnnnnnnnnnnnnnnnnnnnnnnnnnnnnnnnnnnnnnnnnnnnnnnnnnnnnnnnnnnnnnnnnnnnnnnnnnnnnnnnnnnnnnnnnnnnnnnnnnnnnnnnnnnnnnnnnnnnnnnnnnnnnnnnnnnnnnnnnnnnnnnnnnnnnnnnnnnnnnnnnnnnnnnnnnnnnnnnnnnnnnnnnnnnnnnnnnnnnnnnnnnnnnnnnnnnnnnnnnnnnnnnnnnnnnnnnnnnnnnnnnnnnnnnnnnnnnnnnnnnnnnnnnnnnnnnnnnnnnnnnnnnnnnnnnnnnnnnnnnnnnnnnnnnnnnnnnnnnnnnnnnnnnnnnnnnnnnnnnnnnnnnnnnnnnnnnnnnnnnnnnnnnnnnnnnnnnnnnnnnnnnnnnnnnnnnnnnnnnnnnnnnnnnnnnnnnnnnnnnnnnnnnnnnnnnnnnnnnnnnnnnnnnnnnnnnnnnnnnnnnnnnnnnnnnnnnnnnnnnnnnnnnnnnnnnnnnnnnnnnnnnnnnnnnnnnnnnnnnnnnnnnnnnnnnnnnnnnnnnnnnnnnnnnnnnnnnnnnnnnnnnnnnnnnnnnnnnnnnnnnnnnnnnnnnnnnnnnnnnnnnnnnnnnnnnnnnnnnnnnnnnnnnnnnnnnnnnnnnnnnnnnnnnnnnnnnnnnnnnnnnnnnnnnnnnnnnnnnnnnnnnnnnnnnnnnnnnnnnnnnnnnnnnnnnnnnnnnnnnnnnnnnnnnnnnnnnnnnnnnnnnnnnnnnnnnnnnnnnnnnnnnnnnnnnnnnnnnnnnnnnnnnnnnnnnnnnnnnnnnnnnnnnnnnnnnnnnnnnnnnnnnnnnnnnnnnnnnnnnnnnnnnnnnnnnnnnnnnnnnnnnnnnnnnnnnnnnnnnnnnnnnnnnnnnnnnnnnnnnnnnnnnnnnnnnnnnnnnnnnnnnnnnnnnnnnnnnnnnnnnnnnnnnnnnnnnnnnnnnnnnnnnnnnnnnnnnnnnnnnnnnnnnnnnnnnnnnnnnnnnnnnnnnnnnnnnnnnnnnnnnnnnnnnnnnnnnnnnnnnnnnnnnnnnnnnnnnnnnnnnnnnnnnnnnnnnnnnnnnnnnnnnnnnnnnnnnnnnnnnnnnnnnnnnnnnnnnnnnnnnnnnnnnnnnnnnnnnnnnnnnnnnnnnnnnnnnnnnnnnnnnnnnnnnnnnnnnnnnnnnnnnnnnnnnnnnnnnnnnnnnnnnnnnnnnnnnnnnnnnnnnnnnnnnnnnnnnnnnnnnnnnnnnnnnnnnnnnnnnnnnnnnnnnnnnnnnnnnnnnnnnnnnnnnnnnnnnnnnnnnnnnnnnnnnnnnnnnnnnnnnnnnnnnnnnnnnnnnnnnnnnnnnnnnnnnnnnnnnnnnnnnnnnnnnnnnnnnnnnnnnnnnnnnnnnnnnnnnnnnnnnnnnnnnnnnnnnnnnnnnnnnnnnnnnnnnnnnnnnnnnnnnnnnnnnnnnnnnnnnnnnnnnnnnnnnnnnnnnnnnnnnnnnnnnnnnnnnnnnnnnnnnnnnnnnnnnnnnnnnnnnnnnnnnnnnnnnnnnnnnnnnnnnnnnnnnnnnnnnnnnnnnnnnnnnnnnnnnnnnnnnnnnnnnnnnnnnnnnnnnnnnnnnnnnnnnnnnnnnnnnnnnnnnnnnnnnnnnnnnnnnnnnnnnnnnnnnnnnnnnnnnnnnnnnnnnnnnnnnnnnnnnnnnnnnnnnnnnnnnnnnnnnnnnnnnnnnnnnnnnnnnnnnnnnnnnnnnnnnnnnnnnnnnnnnnnnnnnnnnnnnnnnnnnnnnnnnnnnnnnnnnnnnnnnnnnnnnnnnnnnnnnnnnnnnnnnnnnnnnnnnnnnnnnnnnnnnnnnnnnnnnnnnnnnnnnnnnnnnnnnnnnnnnnnnnnnnnnnnnnnnnnnnnnnnnnnnnnnnnnnnnnnnnnnnnnnnnnnnnnnnnnnnnnnnnnnnnnnnnnnnnnnnnnnnnnnnnnnnnnnnnnnnnnnnnnnnnnnnnnnnnnnnnnnnnnnnnnnnnnnnnnnnnnnnnnnnnnnnnnnnnnnnnnnnnnnnnnnnnnnnnnnnnnnnnnnnnnnnnnnnnnnnnnnnnnnnnnnnnnnnnnnnnnnnnnnnnnnnnnnnnnnnnnnnnnnnnnnnnnnnnnnnnnnnnnnnnnnnnnnnnnnnnnnnnnnnnnnnnnnnnnnnnnnnnnnnnnnnnnnnnnnnnnnnnnnnnnnnnnnnnnnnnnnnnnnnnnnnnnnnnnnnnnnnnnnnnnnnnnnnnnnnnnnnnnnnnnnnnnnnnnnnnnnnnnnnnnnnnnnnnnnnnnnnnnnnnnnnnnnnnnnnnnnnnnnnnnnnnnnnnnnnnnnnnnnnnnnnnnnnnnnnnnnnnnnnnnnnnnnnnnnnnnnnnnnnnnnnnnnnnnnnnnnnnnnnnnnnnnnnnnnnnnnnnnnnnnnnnnnnnnnnnnnnnnnnnnnnnnnnnnnnnnnnnnnnnnnnnnnnnnnnnnnnnnnnnnnnnnnnnnnnnnnnnnnnnnnnnnnnnnnnnnnnnnnnnnnnnnnnnnnnnnnnnnnnnnnnnnnnnnnnnnnnnnnnnnnnnnnnnnnnnnnnnnnnnnnnnnnnnnnnnnnnnnnnnnnnnnnnnnnnnnnnnnnnnnnnnnnnnnnnnnnnnnnnnnnnnnnnnnnnnnnnnnnnnnnnnnnnnnnnnnnnnnnnnnnnnnnnnnnnnnnnnnnnnnnnnnnnnnnnnnnnnnnnnnnnnnnnnnnnnnnnnnnnnnnnnnnnnnnnnnnnnnnnnnnnnnnnnnnnnnnnnnnnnnnnnnnnnnnnnnnnnnnnnnnnnnnnnnnnnnnnnnnnnnnnnnnnnnnnnnnnnnnnnnnnnnnnnnnnnnnnnnnnnnnnnnnnnnnnnnnnnnnnnnnnnnnnnnnnnnnnnnnnnnnnnnnnnnnnnnnnnnnnnnnnnnnnnnnnnnnnnnnnnnnnnnnnnnnnnnnnnnnnnnnnnnnnnnnnnnnnnnnnnnnnnnnnnnnnnnnnnnnnnnnnnnnnnnnnnnnnnnnnnnnnnnnnnnnnnnnnnnnnnnnnnnnnnnnnnnnnnnnnnnnnnnnnnnnnnnnnnnnnnnnnnnnnnnnnnnnnnnnnnnnnnnnnnnnnnnnnnnnnnnnnnnnnnnnnnnnnnnnnnnnnnnnnnnnnnnnnnnnnnnnnnnnnnnnnnnnnnnnnnnnnnnnnnnnnnnnnnnnnnnnnnnnnnnnnnnnnnnnnnnnnnnnnnnnnnnnnnnnnnnnnnnnnnnnnnnnnnnnnnnnnnnnnnnnnnnnnnnnnnnnnnnnnnnnnnnnnnnnnnnnnnnnnnnnnnnnnnnnnnnnnnnnnnnnnnnnnnnnnnnnnnnnnnnnnnnnnnnnnnnnnnnnnnnnnnnnnnnnnnnnnnnnnnnnnnnnnnnnnnnnnnnnnnnnnnnnnnnnnnnnnnnnnnnnnnnnnnnnnnnnnnnnnnnnnnnnnnnnnnnnnnnnnnnnnnnnnnnnnnnnnnnnnnnnnnnnnnnnnnnnnnnnnnnnnnnnnnnnnnnnnnnnnnnnnnnnnnnnnnnnnnnnnnnnnnnnnnnnnnnnnnnnnnnnnnnnnnnnnnnnnnnnnnnnnnnnnnnnnnnnnnnnnnnnnnnnnnnnnnnnnnnnnnnnnnnnnnnnnnnnnnnnnnnnnnnnnnnnnnnnnnnnnnnnnnnnnnnnnnnnnnnnnnnnnnnnnnnnnnnnnnnnnnnnnnnnnnnnnnnnnnnnnnnnnnnnnnnnnnnnnnnnnnnnnnnnnnnnnnnnnnnnnnnnnnnnnnnnnnnnnnnnnnnnnnnnnnnnnnnnnnnnnnnnnnnnnnnnnnnnnnnnnnnnnnnnnnnnnnnnnnnnnnnnnnnnnnnnnnnnnnnnnnnnnnnnnnnnnnnnnnnnnnnnnnnnnnnnnnnnnnnnnnnnnnnnnnnnnnnnnnnnnnnnnnnnnnnnnnnnnnnnnnnnnnnnnnnnnnnnnnnnnnnnnnnnnnnnnnnnnnnnnnnnnnnnnnnnnnnnnnnnnnnnnnnnnnnnnnnnnnnnnnnnnnnnnnnnnnnnnnnnnnnnnnnnnnnnnnnnnnnnnnnnnnnnnnnnnnnnnnnnnnnnnnnnnnnnnnnnnnnnnnnnnnnnnnnnnnnnnnnnnnnnnnnnnnnnnnnnnnnnnnnnnnnnnnnnnnnnnnnnnnnnnnnnnnnnnnnnnnnnnnnnnnnnnnnnnnnnnnnnnnnnnnnnnnnnnnnnnnnnnnnnnnnnnnnnnnnnnnnnnnnnnnnnnnnnnnnnnnnnnnnnnnnnnnnnnnnnnnnnnnnnnnnnnnnnnnnnnnnnnnnnnnnnnnnnnnnnnnnnnnnnnnnnnnnnnnnnnnnnnnnnnnnnnnnnnnnnnnnnnnnnnnnnnnnnnnnnnnnnnnnnnnnnnnnnnnnnnnnnnnnnnnnnnnnagcagcggcgccgcgcgtggagggtcgccggggccattttcggctctggccgagcccaaaacgggggcgggcggatccccaatgcgtaaccgaagccctagcggatccgcccccgcccggacgtccgccagctcagccgccccagccccgtcgctggccgcgctatagaaagacgcgtcgctggcgaggctggagtggctggccgtggagcactcgctgtcggtggacggcgagcgctcccggggctgccagtccggccaccagaagcgcatgcgccgatgcggtggtgaagggccgaaaaggtagttggatagaaaagataagtgtagtagttggcctcacgagggataggtgaaagcccccggagaccgtaccgcaattggctagcaagctaaccgaaagcagcagttccaaaaataaatgtgaaaaagaccccaccaaaagcagggaaaccagttttcacactgattagaacagaaagggttaatgtattacctgccggttagtccgttgcgtcctggtagtgactacctgggagtccctaattggtgtgtagttggtgtacgggttgaaccaatcggggggtcggaccatgtgagccggtgcagggtttcctagggcggttccctacatgggtgtggccctgtcggccgcaatgggcctggttgccgtctagcggcggccggagcgcgacggagtccccccggtctccgtcacccgactgcccctggtgtcttggctggggcgctgtgtgtgctggcgggcgcggtgctggctgcaatgcaggttccagatgcggcggctggactgtatgcacgcggcagatagctgccagtccagccgcttcgcatctcgcttgagcagccccaggtgctcggtgtaaaccgagcggttgccaccggcgaccgcaccaagcgagccgtaaacgagcgccgagaggtgcaccttccacccttggcgctcgaggtggcgcttgatgcggtcgtacttggcgcgcttgtgtgcggcgatgcgggccagcgctgagctgtccgggtcctcgcccgcctgctcctcgaacgccacggccaggtcgaccaccgccaccgtcttcttggtgtggttgtacagctggaggtcgggccgtagcgcggggccagcgagcgagggcacggtctggttaacccggagctcaacgcggtcctgccggtcgcccgacgacgacgcgatgagcgcacgctcgatggtcttgagtgcgtcgtcgtggcggccgcggaccgcatccatggtgcccgggcagtggttgagcacatgcgccagcgtctccacccgggagcagcccggctgcctgcatcggtcgtgggcccggaggcgccggcgcttgagcacactgtgcgtgtcgagctggttcaagcgggcggccaccgcgaagcggtagtcagcttcccacaccggtgtcgcgcggcggactgggcctactgccgctgacggaactgcacgcggcgctgcaagtcgcgcatgggtggcagatgctgaactccaaggaccctgccatccagcgcatcgcgcgcgtgcagctccggcagatcgccgacgcgcgccaccggctggacactcaagtgnnnnnnnnnnnnnnnnnnnnnnnnnnnnnnnnnnnnnnnnnnnnnnnnnnnnnnnnnnnnnnnnnnnnnnnnnnnnnnnnnnnnnnnnnnnnnnnnnnnnnnnnnnnnnnnnnnnnnnnnnnnnnnnnnnnnnnnnnnnnnnnnnnnnnnnnnnnnnnnnnnnnnnnnnnnnnnnnnnnnnnnnnnnnnnnnnnnnnnnnnnnnnnnnnnnnnnnnnnnnnnnnnnnnnnnnnnnnnnnnnnnnnnnnnnnnnnnnnnnnnnnnnnnnnnnnnnnnnnnnnnnnnnnnnnnnnnnnnnnnnnnnnnnnnnnnnnnnnnnnnnnnnnnnnnnnnnnnnnnnnnnnnnnnnnnnnnnnnnnnnnnnnnnnnnnnnnnnnnnnnnnnnnnnnnnnnnnnnnnnnnnnnnnnnnnnnnnnnnnnnnnnnnnnnnnnnnnnnnnnnnnnnnnnnnnnnnnnnnnnnnnnnnnnnnnnnnnnnnnnnnnnnnnnnnnnnnnnnnnnnnnnnnnnnnnnnnnnnnnnnnnnnnnnnnnnnnnnnnnnnnnnnnnnnnnnnnnnnnnnnnnnnnnnnnnnnnnnnnnnnnnnnnnnnnnnnnnnnnnnnnnnnnnnnnnnnnnnnnnnnnnnnnnnnnnnnnnnnnnnnnnnnnnnnnnnnnnnnnnnnnnnnnnnnnnnnnnnnnnnnnnnnnnnnnnnnnnnnnnnnnnnnnnnnnnnnnnnnnnnnnnnnnnnnnnnnnnnnnnnnnnnnnnnnnnnnnnnnnnnnnnnnnnnnnnnnnnnnnnnnnnnnnnnnnnnnnnnnnnnnnnnnnnnnnnnnnnnnnnnnnnnnnnnnnnnnnnnnnnnnnnnnnnnnnnnnnnnnnnnnnnnnnnnnnnnnnnnnnnnnnnnnnnnnnnnnnnnnnnnnnnnnnnnnnnnnnnnnnnnnnnnnnnnnnnnnnnnnnnnnnnnnnnnnnnnnnnnnnnnnnnnnnnnnnnnnnnnnnnnnnnnnnnnnnnnnnnnnnnnnnnnnnnnnnnnnnnnnnnnnnnnnnnnnnnnnnnnnnnnnnnnnnnnnnnnnnnnnnnnnnnnnnnnnnnnnnnnnnnnnnnnnnnnnnnnnnnnnnnnnnnnnnnnnnnnnnnnnnnnnnnnnnnnnnnnnnnnnnnnnnnnnnnnnnnnnnnnnnnnnnnnnnnnnnnnnnnnnnnnnnnnnnnnnnnnnnnnnnnnnnnnnnnnnnnnnnnnnnnnnnnnnnnnnnnnnnnnnnnnnnnnnnnnnnnnnnnnnnnnnnnnnnnnnnnnnnnnnnnnnnnnnnnnnnnnnnnnnnnnnnnnnnnnnnnnnnnnnnnnnnnnnnnnnnnnnnnnnnnnnnnnnnnnnnnnnnnnnnnnnnnnnnnnnnnnnnnnnnnnnnnnnnnnnnnnnnnnnnnnnnnnnnnnnnnnnnnnnnnnnnnnnnnnnnnnnnnnnnnnnnnnnnnnnnnnnnnnnnnnnnnnnnnnnnnnnnnnnnnnnnnnnnnnnnnnnnnnnnnnnnnnnnnnnnnnnnnnnnnnnnnnnnnnnnnnnnnnnnnnnnnnnnnnnnnnnnnnnnnnnnnnnnnnnnnnnnnnnnnnnnnnnnnnnnnnnnnnnnnnnnnnnnnnnnnnnnnnnnnnnnnnnnnnnnnnnnnnnnnnnnnnnnnnnnnnnnnnnnnnnnnnnnnnnnnnnnnnnnnnnnnnnnnnnnnnnnnnnnnnnnnnnnnnnnnnnnnnnnnnnnnnnnnnnnnnnnnnnnnnnnnnnnnnnnnnnnnnnnnnnnnnnnnnnnnnnnnnnnnnnnnnnnnnnnnnnnnnnnnnnnnnnnnnnnnnnnnnnnnnnnnnnnnnnnnnnnnnnnnnnnnnnnnnnnnnnnnnnnnnnnnnnnnnnnnnnnnnnnnnnnnnnnnnnnnnnnnnnnnnnnnnnnnnnnnnnnnnnnnnnnnnnnnnnnnnnnnnnnnnnnnnnnnnnnnnnnnnnnnnnnnnnnnnnnnnnnnnnnnnnnnnnnnnnnnnnnnnnnnnnnnnnnnnnnnnnnnnnnnnnnnnnnnnnnnnnnnnnnnnnnnnnnnnnnnnnnnnnnnnnnnnnnnnnnnnnnnnnnnnnnnnnnnnnnnnnnnnnnnnnnnnnnnnnnnnnnnnnnnnnnnnnnnnnnnnnnnnnnnnnnnnnnnnnnnnnnnnnnnnnnnnnnnnnnnnnnnnnnnnnnnnnnnnnnnnnnnnnnnnnnnnnnnnnnnnnnnnnnnnnnnnnnnnnnnnnnnnnnnnnnnnnnnnnnnnnnnnnnnnnnnnnnnnnnnnnnnnnnnnnnnnnnnnnnnnnnnnnnnnnnnnnnnnnnnnnnnnnnnnnnnnnnnnnnnnnnnnnnnnnnnnnnnnnnnnnnnnnnnnnnnnnnnnnnnnnnnnnnnnnnnnnnnnnnnnnnnnnnnnnnnnnnnnnnnnnnnnnnnnnnnnnnnnnnnnnnnnnnnnnnnnnnnnnnnnnnnnnnnnnnnnnnnnnnnnnnnnnnnnnnnnnnnnnnnnnnnnnnnnnnnnnnnnnnnnnnnnnnnnnnnnnnnnnnnnnnnnnnnnnnnnnnnnnnnnnnnnnnnnnnnnnnnnnnnnnnnnnnnnnnnnnnnnnnnnnnnnnnnnnnnnnnnnnnnnnnnnnnnnnnnnnnnnnnnnnnnnnnnnnnnnnnnnnnnnnnnnnnnnnnnnnnnnnnnnnnnnnnnnnnnnnnnnnnnnnnnnnnnnnnnnnnnnnnnnnnnnnnnnnnnnnnnnnnnnnnnnnnnnnnnnnnnnnnnnnnnnnnnnnnnnnnnnnnnnnnnnnnnnnnnnnnnnnnnnnnnnnnnnnnnnnnnnnnnnnnnnnnnnnnnnnnnnnnnnnnnnnnnnnnnnnnnnnnnnnnnnnnnnnnnnnnnnnnnnnnnnnnnnnnnnnnnnnnnnnnnnnnnnnnnnnnnnnnnnnnnnnnnnnnnnnnnnnnnnnnnnnnnnnnnnnnnnnnnnnnnnnnnnnnnnnnnnnnnnnnnnnnnnnnnnnnnnnnnnnnnnnnnnnnnnnnnnnnnnnnnnnnnnnnnnnnnnnnnnnnnnnnnnnnnnnnnnnnnnnnnnnnnnnnnnnnnnnnnnnnnnnnnnnnnnnnnnnnnnnnnnnnnnnnnnnnnnnnnnnnnnnnnnnnnnnnnnnnnnnnnnnnnnnnnnnnnnnnnnnnnnnnnnnnnnnnnnnnnnnnnnnnnnnnnnnnnnnnnnnnnnnnnnnnnnnnnnnnnnnnnnnnnnnnnnnnnnnnnnnnnnnnnnnnnnnnnnnnnnnnnnnnnnnnnnnnnnnnnnnnnnnnnnnnnnnnnnnnnnnnnnnnnnnnnnnnnnnnnnnnnnnnnnnnnnnnnnnnnnnnnnnnnnnnnnnnnnnnnnnnnnnnnnnnnnnnnnnnnnnnnnnnnnnnnnnnnnnnnnnnnnnnnnnnnnnnnnnnnnnnnnnnnnnnnnnnnnnnnnnnnnnnnnnnnnnnnnnnnnnnnnnnnnnnnnnnnnnnnnnnnnnnnnnnnnnnnnnnnnnnnnnnnnnnnnnnnnnnnnnnnnnnnnnnnnnnnnnnnnnnnnnnnnnnnnnnnnnnnnnnnnnnnnnnnnnnnnnnnnnnnnnnnnnnnnnnnnnnnnnnnnnnnnnnnnnnnnnnnnnnnnnnnnnnnnnnnnnnnnnnnnnnnnnnnnnnnnnnnnnnnnnnnnnnnnnnnnnnnnnnnnnnnnnnnnnnnnnnnnnnnnnnnnnnnnnnnnnnnnnnnnnnnnnnnnnnnnnnnnnnnnnnnnnnnnnnnnnnnnnnnnnnnnnnnnnnnnnnnnnnnnnnnnnnnnnnnnnnnnnnnnnnnnnnnnnnnnnnnnnnnnnnnnnnnnnnnnnnnnnnnnnnnnnnnnnnnnnnnnnnnnnnnnnnnnnnnnnnnnnnnnnnnnnnnnnnnnnnnnnnnnnnnnnnnnnnnnnnnnnnnnnnnnnnnnnnnnnnnnnnnnnnnnnnnnnnnnnnnnnnnnnnnnnnnnnnnnnnnnnnnnnnnnnnnnnnnnnnnnnnnnnnnnnnnnnnnnnnnnnnnnnnnnnnnnnnnnnnnnnnnnnnnnnnnnnnnnnnnnnnnnnnnnnnnnnnnnnnnnnnnnnnnnnnnnnnnnnnnnnnnnnnnnnnnnnnnnnnnnnnnnnnnnnnnnnnnnnnnnnnnnnnnnnnnnnnnnnnnnnnnnnnnnnnnnnnnnnnnnnnnnnnnnnnnnnnnnnnnnnnnnnnnnnnnnnnnnnnnnnnnnnnnnnnnnnnnnnnnnnnnnnnnnnnnnnnnnnnnnnnnnnnnnnnnnnnnnnnnnnnnnnnnnnnnnnnnnnnnnnnnnnnnnnnnnnnnnnnnnnnnnnnnnnnnnnnnnnnnnnnnnnnnnnnnnnnnnnnnnnnnnnnnnnnnnnnnnnnnnnnnnnnnnnnnnnnnnnnnnnnnnnnnnnnnnnnnnnnnnnnnnnnnnnnnnnnnnnnnnnnnnnnnnnnnnnnnnnnnnnnnnnnnnnnnnnnnnnnnnnnnnnnnnnnnnnnnnnnnnnnnnnnnnnnnnnnnnnnnnnnnnnnnnnnnnnnnnnnnnnnnnnnnnnnnnnnnnnnnnnnnnnnnnnnnnnnnnnnnnnnnnnnnnnnnnnnnnnnnnnnnnnnnnnnnnnnnnnnnnnnnnnnnnnnnnnnnnnnnnnnnnnnnnnnnnnnnnnnnnnnnnnnnnnnnnnnnnnnnnnnnnnnnnnnnnnnnnnnnnnnnnnnnnnnnnnnnnnnnnnnnnnnnnnnnnnnnnnnnnnnnnnnnnnnnnnnnnnnnnnnnnnnnnnnnnnnnnnnnnnnnnnnnnnnnnnnnnnnnnnnnnnnnnnnnnnnnnnnnnnnnnnnnnnnnnnnnnnnnnnnnnnnnnnnnnnnnnnnnnnnnnnnnnnnnnnnnnnnnnnnnnnnnnnnnnnnnnnnnnnnnnnnnnnnnnnnnnnnnnnnnnnnnnnnnnnnnnnnnnnnnnnnnnnnnnnnnnnnnnnnnnnnnnnnnnnnnnnnnnnnnnnnnnnnnnnnnnnnnnnnnnnnnnnnnnnnnnnnnnnnnnnnnnnnnnnnnnnnnnnnnnnnnnnnnnnnnnnnnnnnnnnnnnnnnnnnnnnnnnnnnnnnnnnnnnnnnnnnnnnnnnnnnnnnnnnnnnnnnnnnnnnnnnnnnnnnnnnnnnnnnnnnnnnnnnnnnnnnnnnnnnnnnnnnnnnnnnnnnnnnnnnnnnnnnnnnnnnnnnnnnnnnnnnnnnnnnnnnnnnnnnnnnnnnnnnnnnnnnnnnnnnnnnnnnnnnnnnnnnnnnnnnnnnnnnnnnnnnnnnnnnnnnnnnnnnnnnnnnnnnnnnnnnnnnnnnnnnnnnnnnnnnnnnnnnnnnnnnnnnnnnnnnnnnnnnnnnnnnnnnnnnnnnnnnnnnnnnnnnnnnnnnnnnnnnnnnnnnnnnnnnnnnnnnnnnnnnnnnnnnnnnnnnnnnnnnnnnnnnnnnnnnnnnnnnnnnnnnnnnnnnnnnnnnnnnnnnnnnnnnnnnnnnnnnnnnnnnnnnnnnnnnnnnnnnnnnnnnnnnnnnnnnnnnnnnnnnnnnnnnnnnnnnnnnnnnnnnnnnnnnnnnnnnnnnnnnnnnnnnnnnnnnnnnnnnnnnnnnnnnnnnnnnnnnnnnnnnnnnnnnnnnnnnnnnnnnnnnnnnnnnnnnnnnnnnnnnnnnnnnnnnnnnnnnnnnnnnnnnnnnnnnnnnnnnnnnnnnnnnnnnnnnnnnnnnnnnnnnnnnnnnnnnnnnnnnnnnnnnnnnnnnnnnnnnnnnnnnnnnnnnnnnnnnnnnnnnnnnnnnnnnnnnnnnnnnnnnnnnnnnnnnnnnnnnnnnnnnnnnnnnnnnnnnnnnnnnnnnnnnnnnnnnnnnnnnnnnnnnnnnnnnnnnnnnnnnnnnnnnnnnnnnnnnnnnnnnnnnnnnnnnnnnnnnnnnnnnnnnnnnnnnnnnnnnnnnnnnnnnnnnnnnnnnnnnnnnnnnnnnnnnnnnnnnnnnnnnnnnnnnnnnnnnnnnnnnnnnnnnnnnnnnnnnnnnnnnnnnnnnnnnnnnnnnnnnnnnnnnnnnnnnnnnnnnnnnnnnnnnnnnnnnnnnnnnnnnnnnnnnnnnnnnnnnnnnnnnnnnnnnnnnnnnnnnnnnnnnnnnnnnnnnnnnnnnnnnnnnnnnnnnnnnnnnnnnnnnnnnnnnnnnnnnnnnnnnnnnnnnnnnnnnnnnnnnnnnnnnnnnnnnnnnnnnnnnnnnnnnnnnnnnnnnnnnnnnnnnnnnnnnnnnnnnnnnnnnnnnnnnnnnnnnnnnnnnnnnnnnnnnnnnnnnnnnnnnnnnnnnnnnnnnnnnnnnnnnnnnnnnnnnnnnnnnnnnnnnnnnnnnnnnnnnnnnnnnnnnnnnnnnnnnnnnnnnnnnnnnnnnnnnnnnnnnnnnnnnnnnnnnnnnnnnnnnnnnnnnnnnnnnnnnnnnnnnnnnnnnnnnnnnnnnnnnnnnnnnnnnnnnnnnnnnnnnnnnnnnnnnnnnnnnnnnnnnnnnnnnnnnnnnnnnnnnnnnnnnnnnnnnnnnnnnnnnnnnnnnnnnnnnnnnnnnnnnnnnnnnnnnnnnnnnnnnnnnnnnnnnnnnnnnnnnnnnnnnnnnnnnnnnnnnnnnnnnnnnnnnnnnnnnnnnnnnnnnnnnnnnnnnnnnnnnnnnnnnnnnnnnnnnnnnnnnnnnnnnnnnnnnnnnnnnnnnnnnnnnnnnnnnnnnnnnnnnnnnnnnnnnnnnnnnnnnnnnnnnnnnnnnnnngcgtgggggctgcgcaggagccgtcactccgcgcgcctcgccgaagcgccgcatgctcgaggccgtgttcttcggccgtggcgaccgtgccgcgcggcgcacgagaggcccgggatcctggcatagtgaggccaggtggacggggcccggtcccgcccggcggacggtccgcgggcccgcgtccgctcgccgtcgccgcgaagcgacgcgaggttgaagcggcggaccgggcctcggcttggccgccagagggcccggcccgcggtcccgcaatgggcacaatgggcgcagcgggtcgcggacccgtgcccgaagttgcgccggccaactcctcgccggtgccgagcagcggcgccgcgcgtggagggtcgccggggccattttcggctccggccgagcccaaaacgggggcgggcggatccccaatgcgtaaccgaagccctagcggatccgcccccgcccggacgtccgccagctcagccgccccagccccgtcgctggccgcgctatagaaagacgcgtcgctggcgaggctggagtggctggccgtggagcactcgctgtcggtggacggcgagcgctcccggggctgccagtccggccaccagaagcgcatgcgccgatgcggtggtgaagggccgaaaaggtagttggatagaaaagataagtgtagtagttggcctcacgagggataggtgaaagcccccggagaccgtaccgcgattggctagcaagctaaccgaaagcagcagttccaaaaataaatgtgaaaaagaccccaccaaaagcagggaaaccagttttcacactgattagaacagaaagggttaatgtattacctgccggttagtccgttgcgtcctggtagtgactacctgggagtccctaattggtgtgtagttggtgtacgggttgaaccaatcgggggatcggaccatgtgagccggtgcagggtttccgagggcggttccctacatgggtgtggccctgtcggccgcaatgggcctggttgccgtctagcggcggccggagcgcgacggagtccccccggtctccgtcacccgactgcccctggtgtcttggctgggacgctgtgcgtgctggcgggcgcggtgctggctgcaatgcaggttccagatgcggcggctggactgtatgcacgcggcagatagctgccagtccagccgcttcgcatctcgcttgagcagccccaggtgctcggtgtaaaccgagcggttgccaccggcgaccgcaccaagcgagccgtaaacgagcgccgagaggtgcaccttccacccttggcgctcgaggtggcgcttgatgcggtcgtacttggcgcgcttgtgtgcggcgatgcgggccagcgctgagctgtccgggtcctcgcccgcctgctcctcgaacgccacggccaggtcgaccaccgccaccgtcttcttggnnnnnnnnnnnnnnnnnnnnnnnnnnnnnnnnnnnnnnnnnnnnnnnnnnnnnnnnnnnnnnnnnnnnnnnnnnnnnnnnnnnnnnnnnnnnnnnnnnnnnnnnnnnnnnnnnnnnnnnnnnnnnnnnnnnnnnnnnnnnnnnnnnnnnnnnnnnnnnnnnnnnnnnnnnnnnnnnnnnnnnnnnnnnnnnnnnnnnnnnnnnnnnnnnnnnnnnnnnnnnnnnnnnnnnnnnnnnnnnnnnnnnnnnnnnnnnnnnnnnnnnnnnnnnnnnnnnnnnnnnnnnnnnnnnnnnnnnnnnnnnnnnnnnnnnnnnnnnnnnnnnnnnnnnnnnnnncgccgcatgctcgaggccgtgttcttcggccgtgtactccgtgccgcgcggcgcacgagaggcccgggatcctggcatagtgaggccaggtggacggggcccggtcccgcccggcggacggtccgcgggcccgcgtccgctcgccgtcgccgcgaagcgacgcgaggttgaagcggcggaccgggcctcggcttggccgccagagggcccggcccgcggtcccgcaatgggcgcaatgggcgcagcgggtcgcggacccgtgcccgaagttgcgccggccaactcctcgccggtgccgagcagcggcgccgcgcgtggagggtcgccggggccattttcggctccggccgagcccaaaacgggggcgggcggatccccaatgcgtaaccgaagccctagcggatccgcccccgcccggacgtccgccagctcagccgccccagccccgtcgctggccgcgctatagaaagacgcgtcgctggcgaggctggagtggctggccgtggagcactcgctgtcggtggacggcgagcgctcccggggctgccagtccggccaccagaagcgcatgcgccgatgcggtggtgaagggccgaaaaggtagttgccggcccgtaggcagaagaaggaagaggatagaaaagatcaagtagtagttggcctcgcgggggatgggtgaaagcccccggagaccgtaccgcgattggctagcaagctaaccgaaagcagcagttccaaaaataaatgtgaaaaagaccccaccaaaagcagggaaaccagttttcacactgattagaacagaaagggttaatgtattacctgccggttagtccgttgcgtcctggtagtgactacctgggagtccctaattggtgtgtagttggtgtacgggttgaaccaatcggggggtcggaccatgtgagccggtgcagggtttccgagggcggttccctacatgggtgtggccctgtcggccgcaatgggcctggttgccgtctagcggcggccggagcgcgacggagtccccccggtctccgtcacccgactgcccctggtgtcttggctggggcgctgtgcgtgctggcgggcgcggtgctggctgcaatgcaggttccagatgcggcggctggactgtatgcacgcggcagatagctgccagtccagccgcttcgcatctcgcttgagcagccccaggtgctcggtgtaaaccgagcggttgccaccggcgaccgcaccaagcgagccgtaaacgagcgccgagaggtgcaccttccacccttggcgctcgaggtggcgcttgatgcggtcgtacttggcgcgcttgtgtgcggcgatgcgggccagcgctgagctgtccgggtcctcgcccgcctgctcctcgaacgccacggccaggtcgaccaccgccaccgtcttcttggtgtggttgtacagctggaggtcgggccgtagcgcggggccagcgagcgagggcacggtctggttaacccggagctcaacgcggtcctgccggtcgcccgacgacgacgcgatgagcgcacgctcgatggtcttgagtgcgtcgtcgtggcggccgcggaccgcatccatggtgcccgggcagtggttgagcacatgcgccagcgtctccacccgggagcagcccggctgcctgcatcggtcgtgggcccggaggcgccggcgcttgagcacactgtgcgtgtcgagctggttcaagcgggcggccaccgcgaagcggtagtcagcttcccacatgcctcgcggccgcgtgaggaagctgctgccgacgccgccgtgcgcgcgtgccgttctgccttggtcgcgcatggccgcccacttggtccagtgtctgtgcttgatgtgcagcttcacgtgccgcaggaccgtgcggtggtcgagccacttgtcgtggtgcggcacgcgaagctgcagcgtggccgcggccgtaccggtgtcggcgcacgccggcgcggtcgcgaactggaggccgagcgtgcggaggtggcgctggacgtcgacccagagcgagccgatgtcgccgttgcggcgctttggcggcgcgtcgggcgacgtcccgagctgcgagttgagcagcagctcgcacagctcctcctcgcggcccgcccacgcttgagtgtccagccggtggcgcgcgtcggcgatctgccggggctgcacgcgcgcgatgcgctggatggcagggtccttggagttcagcatctgccacccatgcgcgacttgcagcgccgcgtgcagttccgtcagcggcagtaggcccagtccgccgcgcgacaccggtgcgtagaagcactgcgctgtggcggaggctggcagtcgcaggagatggcggaggcctcgcgcgaggtgccggtcgaagcccgcaagctgctgctggaaggggcggaggtggcgaagcgcgtactccacccgagggtagaggtacgtcttcaccgccttcaccacctgccacggtgcgaggcccgactggagcagcgctgtcgcgtcatccttcagctgcttgagcgtgggcgcgagctcgacgcggcggcgtgtgtggtcgaagccgtcgccgacccccaggtaggtgtacgaggcgctcatggacagcgcggggatcggcgacccgtccagctccagcttgaggtcgtccgccttgagcacgccgcggcggtcgcgctggatcgacatggcggagcatttgctggggttggccgccatgccggtccagcggaggaagtcggccacgagcgcgtgctgtcgcttgatgccgtcctcggtgccgctgaagatcttgaggtcgtcggcgtacgccgaggcaccggggcagtcatcgcccgacagcggcactcccgtggccggcagtcgcttcagcgcgaagagcagcgggctgatggcagcgttgaagagctgtgggctgagcgggcagccttggaagactcccacccgcagcgagatcggggccgttgtgccgtcggcggcgttcccgacgacgaacgccgcgctctcgtagagccccttgcacatggtgacgtagtcctcggggacgccgagccgcgcgagtgcatcccatagcagcgcgaacggcacgctgccgaacgcgttgcggaagtcgtaccagacttcgtagagctggcggcgcttgcggcgggcctggtcgacgagcgtggccgcgaggaagttgtgctccccgcagccgttgaccgctcggaagcccttctgccccggggcgtggcggtcgttcgcgtccagccaccgtaccagccgccgcgcgaggacccccgtgtagagcttgtagatggcttgctggaggcaaatgggcctccagttcgccgggtcctcgcgcgcgcccttcttgtgcagcagccgcaccaccccgagcttccagctctggggcacacgtttcgcctcccagcacttctggaaggcggtggcgagcacgggcaggagctgcgcggcgaagtgctggcacacgtcatagccgacgccatcgaggccggggctggaggtgccgtgggcgtgctgcagctgtgactcgatatcgtcctgtgtcggcgcctccgtgagcagctccctgaacctcgacgcggcaggcaggtgggtcatagcggagcggaaggcagcacccgccggggcgtccggagcgaactcctggctgggtgtgttgacgccgtcgaagtaccgccagagctcatcgcccggaatggggcaggtaccgtcgtctgtggcgcctgccgctggcgccgctgggtccgatgcggtgccggcgctggaggctgctgtccttggcgtctcctgctgcgcgcgtgccttggccaggatgtcttcgacgcaggctttctcgtccgtgtcgaaccggtgacgcaggtgctgttggtcgatggccgagttgacgcggccgacgcggcggcgggctcggcgaacagccgtgcggtctccgggcgaagcctgctccacggcgtggaggtcgtccaaggcctcgtcgaggcggtgctcgcggtggtgtcgagtcacccgcggcgggcggcggcgacgtcgccgcttcgctgcaccagagcgcccgcggcgcctgcactgcctccgtcgcgccgagtcctgctgactggcgtcgccatcgcgctcgttgtctccatgtgcatcgccttccaggctgcggcggtcctgcccttggtcgtgcagcgggcgctgccgtcgctgttcgccttgttgccgctgctgccgcgggcactggctgccttggtgctgctgtcgctgacgctggggacgcggctcggggcgtcgctgggcctgggagtacggctgcaatttgtcgtacaggaggtgcgggagggctgtgatgtagccctccgccgactcccagtcactggcgtcagtgatcttggccgccagcgtcgcgccaagccgctccaccatctcgcgggcagcgtcgtcctcggcttcggtgagctggcgtagtcggaggcggggtcgacgctgcggaactgcgtccggcccgatgcgcatggctgcatagacctcgccgtcgtcgatgtcggcgagatcctcgtcctccggctcctgctcctgcatctcgatgttggtgtcggccgcgggtgtcgggggcggagcgcggggtgtcggctggggcggcagcacgggcatagggtccagcgtcgtgttcgtacagccgtcgcctgccgtgtgagcgccgcactccatcatcgtccggcnnnnnnnnnnnnnnnnnnnnnnnnnnnnnnnnnnnnnnnnnnnnnnnnnnnnnnnnnnnnnnnnnnnnnnnnnnnnnnnnnnnnnnnnnnnnnnnnnnnnnnnnnnnnnnnnnnnnnnnnnnnnnnnnnnnnnnnnnnnnnnnnnnnnnnnnnnnnnnnnnnnnnnnnnnnnnnnnnnnnnnnnnnnnnnnnnnnnnnnnnnnnnnnnnnnnnnnnnnnnnnnnnnnnnnnnnnnnnnnnnnnnnnnnnnnnnnnnnnnnnnnnnnnnnnnnnnnnnnnnnnnnnnnnnnnnnnnnnnnnnnnnnnnnnnnnnnnnnnnnnnnnnnnnnnnnnnnnnnnnnnnnnnnnnnnnnnnnnnnnnnnnnnnnnnnnnnnnnnnnnnnnnnnnnnnnnnnnnnnnnnnnnnnnnnnnnnnnnnnnnnnnnnnnnnnnnnnnnnnnnnnnnnnnnnnnnnnnnnnnnnnnnnnnnnnnnnnnnnnnnnnnnnnnnnnnnnnnnnnnnnnnnnnnnnnnnnnnnnnnnnnnnnnnnnnnnnnnnnnnnnnnnnnnnnnnnnnnnnnnnnnnnnnnnnnnnnnnnnnnnnnnnnnnnnnnnnnnnnnnnnnnnnnnnnnnnnnnnnnnnnnnnnnnnnnnnnnnnnnnnnnnnnnnnnnnnnnnnnnnnnnnnnnnnnnnnnnnnnnnnnnnnnnnnnnnnnnnnnnnnnnnnnnnnnnnnnnnnnnnnnnnnnnnnnnnnnnnnnnnnnnnnnnnnnnnnnnnnnnnnnnnnnnnnnnnnnnnnnnnnnnnnnnnnnnnnnnnnnnnnnnnnnnnnnnnnnnnnnnnnnnnnnnnnnnnnnnnnnnnnnnnnnnnnnnnnnnnnnnnnnnnnnnnnnnnnnnnnnnnnnnnnnnnnnnnnnnnnnnnnnnnnnnnnnnnnnnnnnnnnnnnnnnnnnnnnnnnnnnnnnnnnnnnnnnnnnnnnnnnnnnnnnnnnnnnnnnnnnnnnnnnnnnnnnnnnnnnnnnnnnnnnnnnnnnnnnnnnnnnnnnnnnnnnnnnnnnnnnnnnnnnnnnnnnnnnnnnnnnnnnnnnnnnnnnnnnnnnnnnnnnnnnnnnnnnnnnnnnnnnnnnnnnnnnnnnnnnnnnnnnnnnnnnnnnnnnnnnnnnnnnnnnnnnnnnnnnnnnnnnnnnnnnnnnnnnnnnnnnnnnnnnnnnnnnnnnnnnnnnnnnnnnnnnnnnnnnnnnnnnnnnnnnnnnnnnnnnnnnnnnnnnnnnnnnnnnnnnnnnnnnnnnnnnnnnnnnnnnnnnnnnnnnnnnnnnnnnnnnnnnnnnnnnnnnnnnnnnnnnnnnnnnnnnnnnnnnnnnnnnnnnnnnnnnnnnnnnnnnnnnnnnnnnnnnnnnnnnnnnnnnnnnnnnnnnnnnnnnnnnnnnnnnnnnnnnnnnnnnnnnnnnnnnnnnnnnnnnnnnnnnnnnnnnnnnnnnnnnnnnnnnnnnnnnnnnnnnnnnnnnnnnnnnnnnnnnnnnnnnnnnnnnnnnnnnnnnnnnnnnnnnnnnnnnnnnnnnnnnnnnnnnnnnnnnnnnnnnnnnnnnnnnnnnnnnnnnnnnnnnnnnnnnnnnnnnnnnnnnnnnnnnnnnnnnnnnnnnnnnnnnnnnnnnnnnnnnnnnnnnnnnnnnnnnnnnnnnnnnnnnnnnnnnnnnnnnnnnnnnnnnnnnnnnnnnnnnnnnnnnnnnnnnnnnnnnnnnnnnnnnnnnnnnnnnnnnnnnnnnnnnnnnnnnnnnnnnnnnnnnnnnnnnnnnnnnnnnnnnnnnnnnnnnnnnnnnnnnnnnnnnnnnnnnnnnnnnnnnnnnnnnnnnnnnnnnnnnnnnnnnnnnnnnnnnnnnnnnnnnnnnnnnnnnnnnnnnnnnnnnnnnnnnnnnnnnnnnnnnnnnnnnnnnnnnnnnnnnnnnnnnnnnnnnnnnnnnnnnnnnnnnnnnnnnnnnnnnnnnnnnnnnnnnnnnnnnnnnnnnnnnnnnnnnnnnnnnnnnnnnnnnnnnnnnnnnnnnnnnnnnnnnnnnnnnnnnnnnnnnnnnnnnnnnnnnnnnnnnnnnnnnnnnnnnnnnnnnnnnnnnnnnnnnnnnnnnnnnnnnnnnnnnnnnnnnnnnnnnnnnnnnnnnnnnnnnnnnnnnnnnnnnnnnnnnnnnnnnnnnnnnnnnnnnnnnnnnnnnnnnnnnnnnnnnnnnnnnnnnnnnnnnnnnnnnnnnnnnnnnnnnnnnnnnnnnnnnnnnnnnnnnnnnnnnnnnnnnnnnnnnnnnnnnnnnnnnnnnnnnnnnnnnnnnnnnnnnnnnnnnnnnnnnnnnnnnnnnnnnnnnnnnnnnnnnnnnnnnnnnnnnnnnnnnnnnnnnnnnnnnnnnnnnnnnnnnnnnnnnnnnnnnnnnnnnnnnnnnnnnnnnnnnnnnnnnnnnnnnnnnnnnnnnnnnnnnnnnnnnnnnnnnnnnnnnnnnnnnnnnnnnnnnnnnnnnnnnnnnnnnnnnnnnnnnnnnnnnnnnnnnnnnnnnnnnnnnnnnnnnnnnnnnnnnnnnnnnnnnnnnnnnnnnnnnnnnnnnnnnnnnnnnnnnnnnnnnnnnnnnnnnnnnnnnnnnnnnnnnnnnnnnnnnnnnnnnnnnnnnnnnnnnnnnnnnnnnnnnnnnnnnnnnnnnnnnnnnnnnnnnnnnnnnnnnnnnnnnnnnnnnnnnnnnnnnnnnnnnnnnnnnnnnnnnnnnnnnnnnnnnnnnnnnnnnnnnnnnnnnnnnnnnnnnnnnnnnnnnnnnnnnnnnnnnnnnnnnnnnnnnnnnnnnnnnnnnnnnnnnnnnnnnnnnnnnnnnnnnnnnnnnnnnnnnnnnnnnnnnnnnnnnnnnnnnnnnnnnnnnnnnnnnnnnnnnnnnnnnnnnnnnnnnnnnnnnnnnnnnnnnnnnnnnnnnnnnnnnnnnnnnnnnnnnnnnnnnnnnnnnnnnnnnnnnnnnnnnnnnnnnnnnnnnnnnnnnnnnnnnnnnnnnnnnnnnnnnnnnnnnnnnnnnnnnnnnnnnnnnnnnnnnnnnnnnnnnnnnnnnnnnnnnnnnnnnnnnnnnnnnnnnnnnnnnnnnnnnnnnnnnnnnnnnnnnnnnnnnnnnnnnnnnnnnnnnnnnnnnnnnnnnnnnnnnnnnnnnnnnnnnnnnnnnnnnnnnnnnnnnnnnnnnnnnnnnnnnnnnnnnnnnnnnnnnnnnnnnnnnnnnnnnnnnnnnnnnnnnnnnnnnnnnnnnnnnnnnnnnnnnnnnnnnnnnnnnnnnnnnnnnnnnnnnnnnnnnnnnnnnnnnnnnnnnnnnnnnnnnnnnnnnnnnnnnnnnnnnnnnnnnnnnnnnnnnnnnnnnnnnnnnnnnnnnnnnnnnnnnnnnnnnnnnnnnnnnnnnnnnnnnnnnnnnnnnnnnnnnnnnnnnnnnnnnnnnnnnnnnnnnnnnnnnnnnnnnnnnnnnnnnnnnnnnnnnnnnnnnnnnnnnnnnnnnnnnnnnnnnnnnnnnnnnnnnnnnnnnnnnnnnnnnnnnnnnnnnnnnnnnnnnnnnnnnnnnnnnnnnnnnnnnnnnnnnnnnnnnnnnnnnnnnnnnnnnnnnnnnnnnnnnnnnnnnnnnnnnnnnnnnnnnnnnnnnnnnnnnnnnnnnnnnnnnnnnnnnnnnnnnnnnnnnnnnnnnnnnnnnnnnnnnnnnnnnnnnnnnnnnnnnnnnnnnnnnnnnnnnnnnnnnnnnnnnnnnnnnnnnnnnnnnnnnnnnnnnnnnnnnnnnnnnnnnnnnnnnnnnnnnnnnnnnnnnnnnnnnnnnnnnnnnnnnnnnnnnnnnnnnnnnnnnnnnnnnnnnnnnnnnnnnnnnnnnnnnnnnnnnnnnnnnnnnnnnnnnnnnnnnnnnnnnnnnnnnnnnnnnnnnnnnnnnnnnnnnnnnnnnnnnnnnnnnnnnnnnnnnnnnnnnnnnnnnnnnnnnnnnnnnnnnnnnnnnnnnnnnnnnnnnnnnnnnnnnnnnnnnnnnnnnnnnnnnnnnnnnnnnnnnnnnnnnnnnnnnnnnnnnnnnnnnnnnnnnnnnnnnnnnnnnnnnnnnnnnnnnnnnnnnnnnnnnnnnnnnnnnnnnnnnnnnnnnnnnnnnnnnnnnnnnnnnnnnnnnnnnnnnnnnnnnnnnnnnnnnnnnnnnnnnnnnnnnnnnnnnnnnnnnnnnnnnnnnnnnnnnnnnnnnnnnnnnnnnnnnnnnnnnnnnnnnnnnnnnnnnnnnnnnnnnnnnnnnnnnnnnnnnnnnnnnnnnnnnnnnnnnnnnnnnnnnnnnnnnnnnnnnnnnnnnnnnnnnnnnnnnnnnnnnnnnnnnnnnnnnnnnnnnnnnnnnnnnnnnnnnnnnnnnnnnnnnnnnnnnnnnnnnnnnnnnnnnnnnnnnnnnnnnnnnnnnnnnnnnnnnnnnnnnnnnnnnnnnnnnnnnnnnnnnnnnnnnnnnnnnnnnnnnnnnnnnnnnnnnnnnnnnnnnnnnnnnnnnnnnnnnnnnnnnnnnnnnnnnnnnnnnnnnnnnnnnnnnnnnnnnnnnnnnnnnnnnnnnnnnnnnnnnnnnnnnnnnnnnnnnnnnnnnnnnnnnnnnnnnnnnnnnnnnnnnnnnnnnnnnnnnnnnnnnnnnnnnnnnnnnnnnnnnnnnnnnnnnnnnnnnnnnnnnnnnnnnnnnnnnnnnnnnnnnnnnnnnnnnnnnnnnnnnnnnnnnnnnnnnnnnnnnnnnnnnnnnnnnnnnnnnnnnnnnnnnnnnnnnnnnnnnnnnnnnnnnnnnnnnnnnnnnnnnnnnnnnnnnnnnnnnnnnnnnnnnnnnnnnnnnnnnnnnnnnnnnnnnnnnnnnnnnnnnnnnnnnnnnnnnnnnnnnnnnnnnnnnnnnnnnnnnnnnnnnnnnnnnnnnnnnnnnnnnnnnnnnnnnnnnnnnnnnnnnnnnnnnnnnnnnnnnnnnnnnnnnnnnnnnnnnnnnnnnnnnnnnnnnnnnnnnnnnnnnnnnnnnnnnnnnnnnnnnnnnnnnnnnnnnnnnnnnnnnnnnnnnnnnnnnnnnnnnnnnnnnnnnnnnnnnnnnnnnnnnnnnnnnnnnnnnnnnnnnnnnnnnnnnnnnnnnnnnnnnnnnnnnnnnnnnnnnnnnnnnnnnnnnnnnnnnnnnnnnnnnnnnnnnnnnnnnnnnnnnnnnnnnnnnnnnnnnnnnnnnnnnnnnnnnnnnnnnnnnnnnnnnnnnnnnnnnnnnnnnnnnnnnnnnnnnnnnnnnnnnnnnnnnnnnnnnnnnnnnnnnnnnnnnnnnnnnnnnnnnnnnnnnnnnnnnnnnnnnnnnnnnnnnnnnnnnnnnnnnnnnnnnnnnnnnnnnnnnnnnnnnnnnnnnnnnnnnnnnnnnnnnnnnnnnnnnnnnnnnnnnnnnnnnnnnnnnnnnnnnnnnnnnnnnnnnnnnnnnnnnnnnnnnnnnnnnnnnnnnnnnnnnnnnnnnnnnnnnnnnnnnnnnnnnnnnnnnnnnnnnnnnnnnnnnnnnnnnnnnnnnnnnnnnnnnnnnnnnnnnnnnnnnnnnnnnnnnnnnnnnnnnnnnnnnnnnnnnnnnnnnnnnnnnnnnnnnnnnnnnnnnnnnnnnnnnnnnnnnnnnnnnnnnnnnnnnnnnnnnnnnnnnnnnnnnnnnnnnnnnnnnnnnnnnnnnnnnnnnnnnnnnnnnnnnnnnnnnnnnnnnnnnnnnnnnnnnnnnnnnnnnnnnnnnnnnnnnnnnnnnnnnnnnnnnnnnnnnnnnnnnnnnnnnnnnnnnnnnnnnnnnnnnnnnnnnnnnnnnnnnnnnnnnnnnnnnnnnnnnnnnnnnnnnnnnnnnnnnnnnnnnnnnnnnnnnnnnnnnnnnnnnnnnnnnnnnnnnnnnnnnnnnnnnnnnnnnnnnnnnnnnnnnnnnnnnnnnnnnnnnnnnnnnnnnnnnnnnnnnnnnnnnnnnnnnnnnnnnnnnnnnnnnnnnnnnnnnnnnnnnnnnnnnnnnnnnnnnnnnnnnnnnnnnnnnnnnnnnnnnnnnnnnnnnnnnnnnnnnnnnnnnnnnnnnnnnnnnnnnnnnnnnnnnnnnnnnnnnnnnnnnnnnnnnnnnnnnnnnnnnnnnnnnnnnnnnnnnnnnnnnnnnnnnnnnnnnnnnnnnnnnnnnnnnnnnnnnnnnnnnnnnnnnnnnnnnnnnnnnnnnnnnnnnnnnnnnnnnnnnnnnnnnnnnnnnnnnnnnnnnnnnnnnnnnnnnnnnnnnnnnnnnnnnnnnnnnnnnnnnnnnnnnnnnnnnnnnnnnnnnnnnnnnnnnnnnnnnnnnnnnnnnnnnnnnnnnnnnnnnnnnnnnnnnnnnnnnnnnnnnnnnnnnnnnnnnnnnnnnnnnnnnnnnnnnnnnnnnnnnnnnnnnnnnnnnnnnnnnnnnnnnnnnnnnnnnnnnnnnnnnnnnnnnnnnnnnnnnnnnnnnnnnnnnnnnnnnnnnnnnnnnnnnnnnnnnnnnnnnnnnnnnnnnnnnnnnnnnnnnnnnnnnnnnnnnnnnnnnnnnnnnnnnnnnnnnnnnnnnnnnnnnnnnnnnnnnnnnnnnnnnnnnnnnnnnnnnnnnnnnnnnnnnnnnnnnnnnnnnnnnnnnnnnnnnnnnnnnnnnnnnnnnnnnnnnnnnnnnnnnnnnnnnnnnnnnnnnnnnnnnnnnnnnnnnnnnnnnnnnnnnnnnnnnnnnnnnnnnnnnnnnnnnnnnnnnnnnnnnnnnnnnnnnnnnnnnnnnnnnnnnnnnnnnnnnnnnnnnnnnnnnnnnnnnnnnnnnnnnnnnnnnnnnnnnnnnnnnnnnnnnnnnnnnnnnnnnnnnnnnnnnnnnnnnnnnnnnnnnnnnnnnnnnnnnnnnnnnnnnnnnnnnnnnnnnnnnnnnnnnnnnnnnnnnnnnnnnnnnnnnnnnnnnnnnnnnnnnnnnnnnnnnnnnnnnnnnnnnnnnnnnnnnnnnnnnnnnnnnnnnnnnnnnnnnnnnnnnnnnnnnnnnnnnnnnnnnnnnnnnnnnnnnnnnnnnnnnnnnnnnnnnnnnnnnnnnnnnnnnnnnnnnnnnnnnnnnnnnnnnnnnnnnnnnnnnnnnnnnnnnnnnnnnnnnnnnnnnnnnnnnnnnnnnnnnnnnnnnnnnnnnnnnnnnnnnnnnnnnnnnnnnnnnnnnnnnnnnnnnnnnnnnnnnnnnnnnnnnnnnnnnnnnnnnnnnnnnnnnnnnnnnnnnnnnnnnnnnnnnnnnnnnnnnnnnnnnnnnnnnnnnnnnnnnnnnnnnnnnnnnnnnnnnnnnnnnnnnnnnnnnnnnnnnnnnnnnnnnnnnnnnnnnnnnnnnnnnnnnnnnnnnnnnnnnnnnnnnnnnnnnnnnnnnnnnnnnnnnnnnnnnnnnnnnnnnnnnnnnnnnnnnnnnnnnnnnnnnnnnnnnnnnnnnnnnnnnnnnnnnnnnnnnnnnnnnnnnnnnnnnnnnnnnnnnnnnnnnnnnnnnnnnnnnnnnnnnnnnnnnnnnnnnnnnnnnnnnnnnnnnnnnnnnnnnnnnnnnnnnnnnnnnnnnnnnnnnnnnnnnnnnnnnnnnnnnnnnnnnnnnnnnnnnnnnnnnnnnnnnnnnnnnnnnnnnnnnnnnnnnnnnnnnnnnnnnnnnnnnnnnnnnnnnnnnnnnnnnnnnnnnnnnnnnnnnnnnnnnnnnnnnnnnnnnnnnnnnnnnnnnnnnnnnnnnnnnnnnnnnnnnnnnnnnnnnnnnnnnnnnnnnnnnnnnnnnnnnnnnnnnnnnnnnnnnnnnnnnnnnnnnnnnnnnnnnnnnnnnnnnnnnnnnnnnnnnnnnnnnnnnnnnnnnnnnnnnnnnnnnnnnnnnnnnnnnnnnnnnnnnnnnnnnnnnnnnnnnnnnnnnnnnnnnnnnnnnnnnnnnnnnnnnnnnnnnnnnnnnnnnnnnnnnnnnnnnnnnnnnnnnnnnnnnnnnnnnnnnnnnnnnnnnnnnnnnnnnnnnnnnnnnnnnnnnnnnnnnnnnnnnnnnnnnnnnnnnnnnnnnnnnnnnnnnnnnnnnnnnnnnnnnnnnnnnnnnnnnnnnnnnnnnnnnnnnnnnnnnnnnnnnnnnnnnnnnnnnnnnnnnnnnnnnnnnnnnnnnnnnnnnnnnnnnnnnnnnnnnnnnnnnnnnnnnnnnnnnnnnnnnnnnnnnnnnnnnnnnnnnnnnnnnnnnnnnnnnnnnnnnnnnnnnnnnnnnnnnnnnnnnnnnnnnnnnnnnnnnnnnnnnnnnnnnnnnnnnnnnnnnnnnnnnnnnnnnnnnnnnnnnnnnnnnnnnnnnnnnnnnnnnnnnnnnnnnnnnnnnnnnnnnnnnnnnnnnnnnnnnnnnnnnnnnnnnnnnnnnnnnnnnnnnnnnnnnnnnnnnnnnnnnnnnnnnnnnnnnnnnnnnnnnnnnnnnnnnnnnnnnnnnnnnnnnnnnnnnnnnnnnnnnnnnnnnnnnnnnnnnnnnnnnnnnnnnnnnnnnnnnnnnnnnnnnnnnnnnnnnnnnnnnnnnnnnnnnnnnnnnnnnnnnnnnnnnnnnnnnnnnnnnnnnnnnnnnnnnnnnnnnnnnnnnnnnnnnnnnnnnnnnnnnnnnnnnnnnnnnnnnnnnnnnnnnnnnnnnnnnnnnnnnnnnnnnnnnnnnnnnnnnnnnnnnnnnnnnnnnnnnnnnnnnnnnnnnnnnnnnnnnnnnnnnnnnnnnnnnnnnnnnnnnnnnnnnnnnnnnnnnnnnnnnnnnnnnnnnnnnnnnnnnnnnnnnnnnnnnnnnnnnnnnnnnnnnnnnnnnnnnnnnnnnnnnnnnnnnnnnnnnnnnnnnnnnnnnnnnnnnnnnnnnnnnnnnnnnnnnnnnnnnnnnnnnnnnnnnnnnnnnnnnnnnnnnnnnnnnnnnnnnnnnnnnnnnnnnnnnnnnnnnnnnnnnnnnnnnnnnnnnnnnnnnnnnnnnnnnnnnnnnnnnnnnnnnnnnnnnnnnnnnnnnnnnnnnnnnnnnnnnnnnnnnnnnnnnnnnnnnnnnnnnnnnnnnnnnnnnnnnnnnnnnnnnnnnnnnnnnnnnnnnnnnnnnnnnnnnnnnnnnnnnnnnnnnnnnnnnnnnnnnnnnnnnnnnnnnnnnnnnnnnnnnnnnnnnnnnnnnnnnnnnnnnnnnnnnnnnnnnnnnnnnnnnnnnnnnnnnnnnnnnnnnnnnnnnnnnnnnnnnnnnnnnnnnnnnnnnnnnnnnnnnnnnnnnnnnnnnnnnnnnnnnnnnnnnnnnnnnnnnnnnnnnnnnnnnnnnnnnnnnnnnnnnnnnnnnnnnnnnnnnnnnnnnnnnnnnnnnnnnnnnnnnnnnnnnnnnnnnnnnnnnnnnnnnnnnnnnnnnnnnnnnnnnnnnnnnnnnnnnnnnnnnnnnnnnnnnnnnnnnnnnnnnnnnnnnnnnnnnnnnnnnnnnnnnnnnnnnnnnnnnnnnnnnnnnnnnnnnnnnnnnnnnnnnnnnnnnnnnnnnnnnnnnnnnnnnnnnnnnnnnnnnnnnnnnnnnnnnnnnnnnnnnnnnnnnnnnnnnnnnnnnnnnnnnnnnnnnnnnnnnnnnnnnnnnnnnnnnnnnnnnnnnnnnnnnnnnnnnnnnnnnnnnnnnnnnnnnnnnnnnnnnnnnnnnnnnnnnnnnnnnnnnnnnnnnnnnnnnnnnnnnnnnnnnnnnnnnnnnnnnnnnnnnnnnnnnnnnnnnnnnnnnnnnnnnnnnnnnnnnnnnnnnnnnnnnnnnnnnnnnnnnnnnnnnnnnnnnnnnnnnnnnnnnnnnnnnnnnnnnnnnnnnnnnnnnnnnnnnnnnnnnnnnnnnnnnnnnnnnnnnnnnnnnnnnnnnnnnnnnnnnnnnnnnnnnnnnnnnnnnnnnnnnnnnnnnnnnnnnnnnnnnnnnnnnnnnnnnnnnnnnnnnnnnnnnnnnnnnnnnnnnnnnnnnnnnnnnnnnnnnnnnnnnnnnnnnnnnnnnnnnnnnnnnnnnnnnnnnnnnnnnnnnnnnnnnnnnnnnnnnnnnnnnnnnnnnnnnnnnnnnnnnnnnnnnnnnnnnnnnnnnnnnnnnnnnnnnnnnnnnnnnnnnnnnnnnnnnnnnnnnnnnnnnnnnnnnnnnnnnnnnnnnnnnnnnnnnnnnnnnnnnnnnnnnnnnnnnnnnnnnnnnnnnnnnnnnnnnnnnnnnnnnnnnnnnnnnnnnnnnnnnnnnnnnnnnnnnnnnnnnnnnnnnnnnnnnnnnnnnnnnnnnnnnnnnnnnnnnnnnnnnnnnnnnnnnnnnnnnnnnnnnnnnnnnnnnnnnnnnnnnnnnnnnnnnnnnnnnnnnnnnnnnnnnnnnnnnnnnnnnnnnnnnnnnnnnnnnnnnnnnnnnnnnnnnnnnnnnnnnnnnnnnnnnnnnnnnnnnnnnnnnnnnnnnnnnnnnnnnnnnnnnnnnnnnnnnnnnnnnnnnnnnnnnnnnnnnnnnnnnnnnnnnnnnnnnnnnnnnnnnnnnnnnnnnnnnnnnnnnnnnnnnnnnnnnnnnnnnnnnnnnnnnnnnnnnnnnnnnnnnnnnnnnnnnnnnnnnnnnnnnnnnnnnnnnnnnnnnnnnnnnnnnnnnnnnnnnnnnnnnnnnnnnnnnnnnnnnnnnnnnnnnnnnnnnnnnnnnnnnnnnnnnnnnnnnnnnnnnnnnnnnnnnnnnnnnnnnnnnnnnnnnnnnnnnnnnnnnnnnnnnnnnnnnnnnnnnnnnnnnnnnnnnnnnnnnnnnnnnnnnnnnnnnnnnnnnnnnnnnnnnnnnnnnnnnnnnnnnnnnnnnnnnnnnnnnnnnnnnnnnnnnnnnnnnnnnnnnnnnnnnnnnnnnnnnnnnnnnnnnnnnnnnnnnnnnnnnnnnnnnnnnnnnnnnnnnnnnnnnnnnnnnnnnnnnnnnnnnnnnnnnnnnnnnnnnnnnnnnnnnnnnnnnnnnnnnnnnnnnnnnnnnnnnnnnnnnnnnnnnnnnnnnnnnnnnnnnnnnnnnnnnnnnnnnnnnnnnnnnnnnnnnnnnnnnnnnnnnnnnnnnnnnnnnnnnnnnnnnnnnnnnnnnnnnnnnnnnnnnnnnnnnnnnnnnnnnnnnnnnnnnnnnnnnnnnnnnnnnnnnnnnnnnnnnnnnnnnnnnnnnnnnnnnnnnnnnnnnnnnnnnnnnnnnnnnnnnnnnnnnnnnnnnnnnnnnnnnnnnnnnnnnnnnnnnnnnnnnnnnnnnnnnnnnnnnnnnnnnnnnnnnnnnnnnnnnnnnnnnnnnnnnnnnnnnnnnnnnnnnnnnnnnnnnnnnnnnnnnnnnnnnnnnnnnnnnnnnnnnnnnnnnnnnnnnnnnnnnnnnnnnnnnnnnnnnnnnnnnnnnnnnnnnnnnnnnnnnnnnnnnnnnnnnnnnnnnnnnnnnnnnnnnnnnnnnnnnnnnnnnnnnnnnnnnnnnnnnnnnnnnnnnnnnnnnnnnnnnnnnnnnnnnnnnnnnnnnnnnnnnnnnnnnnnnnnnnnnnnnnnnnnnnnnnnnnnnnnnnnnnnnnnnnnnnnnnnnnnnnnnnnnnnnnnnnnnnnnnnnnnnnnnnnnnnnnnnnnnnnnnnnnnnnnnnnnnnnnnnnnnnnnnnnnnnnnnnnnnnnnnnnnnnnnnnnnnnnnnnnnnnnnnnnnnnnnnnnnnnnnnnnnnnnnnnnnnnnnnnnnnnnnnnnnnnnnnnnnnnnnnnnnnnnnnnnnnnnnnnnnnnnnnnnnnnnnnnnnnnnnnnnnnnnnnnnnnnnnnnnnnnnnnnnnnnnnnnnnnnnnnnnnnnnnnnnnnnnnnnnnnnnnnnnnnnnnnnnnnnnnnnnnnnnnnnnnnnnnnnnnnnnnnnnnnnnnnnnnnnnnnnnnnnnnnnnnnnnnnnnnnnnnnnnnnnnnnnnnnnnnnnnnnnnnnnnnnnnnnnnnnnnnnnnnnnnnnnnnnnnnnnnnnnnnnnnnnnnnnnnnnnnnnnnnnnnnnnnnnnnnnnnnnnnnnnnnnnnnnnnnnnnnnnnnnnnnnnnnnnnnnnnnnnnnnnnnnnnnnnnnnnnnnnnnnnnnnnnnnnnnnnnnnnnnnnnnnnnnnnnnnnnnnnnnnnnnnnnnnnnnnnnnnnnnnnnnnnnnnnnnnnnnnnnnnnnnnnnnnnnnnnnnnnnnnnnnnnnnnnnnnnnnnnnnnnnnnnnnnnnnnnnnnnnnnnnnnnnnnnnnnnnnnnnnnnnnnnnnnnnnnnnnnnnnnnnnnnnnnnnnnnnnnnnnnnnnnnnnnnnnnnnnnnnnnnnnnnnnnnnnnnnnnnnnnnnnnnnnnnnnnnnnnnnnnnnnnnnnnnnnnnnnnnnnnnnnnnnnnnnnnnnnnnnnnnnnnnnnnnnnnnnnnnnnnnnnnnnnnnnnnnnnnnnnnnnnnnnnnnnnnnnnnnnnnnnnnnnnnnnnnnnnnnnnnnnnnnnnnnnnnnnnnnnnnnnnnnnnnnnnnnnnnnnnnnnnnnnnnnnnnnnnnnnnnnnnnnnnnnnnnnnnnnnnnnnnnnnnnnnnnnnnnnnnnnnnnnnnnnnnnnnnnnnnnnnnnnnnnnnnnnnnnnnnnnnnnnnnnnnnnnnnnnnnnnnnnnnnnnnnnnnnnnnnnnnnnnnnnnnnnnnnnnnnnnnnnnnnnnnnnnnnnnnnnnnnnnnnnnnnnnnnnnnnnnnnnnnnnnnnnnnnnnnnnnnnnnnnnnnnnnnnnnnnnnnnnnnnnnnnnnnnnnnnnnnnnnnnnnnnnnnnnnnnnnnnnnnnnnnnnnnnnnnnnnnnnnnnnnnnnnnnnnnnnnnnnnnnnnnnnnnnnnnnnnnnnnnnnnnnnnnnnnnnnnnnnnnnnnnnnnnnnnnnnnnnnnnnnnnnnnnnnnnnnnnnnnnnnnnnnnnnnnnnnnnnnnnnnnnnnnnnnnnnnnnnnnnnnnnnnnnnnnnnnnnnnnnnnnnnnnnnnnnnnnnnnnnnnnnnnnnnnnnnnnnnnnnnnnnnnnnnnnnnnnnnnnnnnnnnnnnnnnnnnnnnnnnnnnnnnnnnnnnnnnnnnnnnnnnnnnnnnnnnnnnnnnnnnnnnnnnnnnnnnnnnnnnnnnnnnnnnnnnnnnnnnnnnnnnnnnnnnnnnnnnnnnnnnnnnnnnnnnnnnnnnnnnnnnnnnnnnnnnnnnnnnnnnnnnnnnnnnnnnnnnnnnnnnnnnnnnnnnnnnnnnnnnnnnnnnnnnnnnnnnnnnnnnnnnnnnnnnnnnnnnnnnnnnnnnnnnnnnnnnnnnnnnnnnnnnnnnnnnnnnnnnnnnnnnnnnnnnnnnnnnnnnnnnnnnnnnnnnnnnnnnnnnnnnnnnnnnnnnnnnnnnnnnnnnnnnnnnnnnnnnnnnnnnnnnnnnnnnnnnnnnnnnnnnnnnnnnnnnnnnnnnnnnnnnnnnnnnnnnnnnnnnnnnnnnnnnnnnnnnnnnnnnnnnnnnnnnnnnnnnnnnnnnnnnnnnnnnnnnnnnnnnnnnnnnnnnnnnnnnnnnnnnnnnnnnnnnnnnnnnnnnnnnnnnnnnnnnnnnnnnnnnnnnnnnnnnnnnnnnnnnnnnnnnnnnnnnnnnnnnnnnnnnnnnnnnnnnnnnnnnnnnnnnnnnnnnnnnnnnnnnnnnnnnnnnnnnnnnnnnnnnnnnnnnnnnnnnnnnnnnnnnnnnnnnnnnnnnnnnnnnnnnnnnnnnnnnnnnnnnnnnnnnnnnnnnnnnnnnnnnnnnnnnnnnnnnnnnnnnnnnnnnnnnnnnnnnnnnnnnnnnnnnnnnnnnnnnnnnnnnnnnnnnnnnnnnnnnnnnnnnnnnnnnnnnnnnnnnnnnnnnnnnnnnnnnnnnnnnnnnnnnnnnnnnnnnnnnnnnnnnnnnnnnnnnnnnnnnnnnnnnnnnnnnnnnnnnnnnnnnnnnnnnnnnnnnnnnnnnnnnnnnnnnnnnnnnnnnnnnnnnnnnnnnnnnnnnnnnnnnnnnnnnnnnnnnnnnnnnnnnnnnnnnnnnnnnnnnnnnnnnnnnnnnnnnnnnnnnnnnnnnnnnnnnnnnnnnnnnnnnnnnnnnnnnnnnnnnnnnnnnnnnnnnnnnnnnnnnnnnnnnnnnnnnnnnnnnnnnnnnnnnnnnnnnnnnnnnnnnnnnnnnnnnnnnnnnnnnnnnnnnnnnnnnnnnnnnnnnnnnnnnnnnnnnnnnnnnnnnnnnnnnnnnnnnnnnnnnnnnnnnnnnnnnnnnnnnnnnnnnnnnnnnnnnnnnnnnnnnnnnnnnnnnnnnnnnnnnnnnnnnnnnnnnnnnnnnnnnnnnnnnnnnnnnnnnnnnnnnnnnnnnnnnnnnnnnnnnnnnnnnnnnnnnnnnnnnnnnnnnnnnnnnnnnnnnnnnnnnnnnnnnnnnnnnnnnnnnnnnnnnnnnnnnnnnnnnnnnnnnnnnnnnnnnnnnnnnnnnnnnnnnnnnnnnnnnnnnnnnnnnnnnnnnnnnnnnnnnnnnnnnnnnnnnnnnnnnnnnnnnnnnnnnnnnnnnnnnnnnnnnnnnnnnnnnnnnnnnnnnnnnnnnnnnnnnnnnnnnnnnnnnnnnnnnnnnnnnnnnnnnnnnnnnnnnnnnnnnnnnnnnnnnnnnnnnnnnnnnnnnnnnnnnnnnnnnnnnnnnnnnnnnnnnnnnnnnnnnnnnnnnnnnnnnnnnnnnnnnnnnnnnnnnnnnnnnnnnnnnnnnnnnnnnnnnnnnnnnnnnnnnnnnnnnnnnnnnnnnnnnnnnnnnnnnnnnnnnnnnnnnnnnnnnnnnnnnnnnnnnnnnnnnnnnnnnnnnnnnnnnnnnnnnnnnnnnnnnnnnnnnnnnnnnnnnnnnnnnnnnnnnnnnnnnnnnnnnnnnnnnnnnnnnnnnnnnnnnnnnnnnnnnnnnnnnnnnnnnnnnnnnnnnnnnnnnnnnnnnnnnnnnnnnnnnnnnnnnnnnnnnnnnnnnnnnnnnnnnnnnnnnnnnnnnnnnnnnnnnnnnnnnnnnnnnnnnnnnnnnnnnnnnnnnnnnnnnnnnnnnnnnnnnnnnnnnnnnnnnnnnnnnnnnnnnnnnnnnnnnnnnnnnnnnnnnnnnnnnnnnnnnnnnnnnnnnnnnnnnnnnnnnnnnnnnnnnnnnnnnnnnnnnnnnnnnnnnnnnnnnnnnnnnnnnnnnnnnnnnnnnnnnnnnnnnnnnnnnnnnnnnnnnnnnnnnnnnnnnnnnnnnnnnnnnnnnnnnnnnnnnnnnnnnnnnnnnnnnnnnnnnnnnnnnnnnnnnnnnnnnnnnnnnnnnnnnnnnnnnnnnnnnnnnnnnnnnnnnnnnnnnnnnnnnnnnnnnnnnnnnnnnnnnnnnnnnnnnnnnnnnnnnnnnnnnnnnnnnnnnnnnnnnnnnnnnnnnnnnnnnnnnnnnnnnnnnnnnnnnnnnnnnnnnnnnnnnnnnnnnnnnnnnnnnnnnnnnnnnnnnnnnnnnnnnnnnnnnnnnnnnnnnnnnnnnnnnnnnnnnnnnnnnnnnnnnnnnnnnnnnnnnnnnnnnnnnnnnnnnnnnnnnnnnnnnnnnnnnnnnnnnnnnnnnnnnnnnnnnnnnnnnnnnnnnnnnnnnnnnnnnnnnnnnnnnnnnnnnnnnnnnnnnnnnnnnnnnnnnnnnnnnnnnnnnnnnnnnnnnnnnnnnnnnnnnnnnnnnnnnnnnnnnnnnnnnnnnnnnnnnnnnnnnnnnnnnnnnnnnnnnnnnnnnnnnnnnnnnnnnnnnnnnnnnnnnnnnnnnnnnnnnnnnnnnnnnnnnnnnnnnnnnnnnnnnnnnnnnnnnnnnnnnnnnnnnnnnnnnnnnnnnnnnnnnnnnnnnnnnnnnnnnnnnnnnnnnnnnnnnnnnnnnnnnnnnnnnnnnnnnnnnnnnnnnnnnnnnnnnnnnnnnnnnnnnnnnnnnnnnnnnnnnnnnnnnnnnnnnnnnnnnnnnnnnnnnnnnnnnnnnnnnnnnnnnnnnnnnnnnnnnnnnnnnnnnnnnnnnnnnnnnnnnnnnnnnnnnnnnnnnnnnnnnnnnnnnnnnnnnnnnnnnnnnnnnnnnnnnnnnnnnnnnnnnnnnnnnnnnnnnnnnnnnnnnnnnnnnnnnnnnnnnnnnnnnnnnnnnnnnnnnnnnnnnnnnnnnnnnnnnnnnnnnnnnnnnnnnnnnnnnnnnnnnnnnnnnnnnnnnnnnnnnnnnnnnnnnnnnnnnnnnnnnnnnnnnnnnnnnnnnnnnnnnnnnnnnnnnnnnnnnnnnnnnnnnnnnnnnnnnnnnnnnnnnnnnnnnnnnnnnnnnnnnnnnnnnnnnnnnnnnnnnnnnnnnnnnnnnnnnnnnnnnnnnnnnnnnnnnnnnnnnnnnnnnnnnnnnnnnnnnnnnnnnnnnnnnnnnnnnnnnnnnnnnnnnnnnnnnnnnnnnnnnnnnnnnnnnnnnnnnnnnnnnnnnnnnnnnnnnnnnnnnnnnnnnnnnnnnnnnnnnnnnnnnnnnnnnnnnnnnnnnnnnnnnnnnnnnnnnnnnnnnnnnnnnnnnnnnnnnnnnnnnnnnnnnnnnnnnnnnnnnnnnnnnnnnnnnnnnnnnnnnnnnnnnnnnnnnnnnnnnnnnnnnnnnnnnnnnnnnnnnnnnnnnnnnnnnnnnnnnnnnnnnnnnnnnnnnnnnnnnnnnnnnnnnnnnnnnnnnnnnnnnnnnnnnnnnnnnnnnnnnnnnnnnnnnnnnnnnnnnnnnnnnnnnnnnnnnnnnnnnnnnnnnnnnnnnnnnnnnnnnnnnnnnnnnnnnnnnnnnnnnnnnnnnnnnnnnnnnnnnnnnnnnnnnnnnnnnnnnnnnnnnnnnnnnnnnnnnnnnnnnnnnnnnnnnnnnnnnnnnnnnnnnnnnnnnnnnnnnnnnnnnnnnnnnnnnnnnnnnnnnnnnnnnnnnnnnnnnnnnnnnnnnnnnnnnnnnnnnnnnnnnnnnnnnnnnnnnnnnnnnnnnnnnnnnnnnnnnnnnnnnnnnnnnnnnnnnnnnnnnnnnnnnnnnnnnnnnnnnnnnnnnnnnnnnnnnnnnnnnnnnnnnnnnnnnnnnnnnnnnnnnnnnnnnnnnnnnnnnnnnnnnnnnnnnnnnnnnnnnnnnnnnnnnnnnnnnnnnnnnnnnnnnnnnnnnnnnnnnnnnnnnnnnnnnnnnnnnnnnnnnnnnnnnnnnnnnnnnnnnnnnnnnnnnnnnnnnnnnnnnnnnnnnnnnnnnnnnnnnnnnnnnnnnnnnnnnnnnnnnnnnnnnnnnnnnnnnnnnnnnnnnnnnnnnnnnnnnnnnnnnnnnnnnnnnnnnnnnnnnnnnnnnnnnnnnnnnnnnnnnnnnnnnnnnnnnnnnnnnnnnnnnnnnnnnnnnnnnnnnnnnnnnnnnnnnnnnnnnnnnnnnnnnnnnnnnnnnnnnnnnnnnnnnnnnnnnnnnnnnnnnnnnnnnnnnnnnnnnnnnnnnnnnnnnnnnnnnnnnnnnnnnnnnnnnnnnnnnnnnnnnnnnnnnnnnnnnnnnnnnnnnnnnnnnnnnnnnnnnnnnnnnnnnnnnnnnnnnnnnnnnnnnnnnnnnnnnnnnnnnnnnnnnnnnnnnnnnnnnnnnnnnnnnnnnnnnnnnnnnnnnnnnnnnnnnnnnnnnnnnnnnnnnnnnnnnnnnnnnnnnnnnnnnnnnnnnnnnnnnnnnnnnnnnnnnnnnnnnnnnnnnnnnnnnnnnnnnnnnnnnnnnnnnnnnnnnnnnnnnnnnnnnnnnnnnnnnnnnnnnnnnnnnnnnnnnnnnnnnnnnnnnnnnnnnnnnnnnnnnnnnnnnnnnnnnnnnnnnnnnnnnnnnnnnnnnnnnnnnnnnnnnnnnnnnnnnnnnnnnnnnnnnnnnnnnnnnnnnnnnnnnnnnnnnnnnnnnnnnnnnnnnnnnnnnnnnnnnnnnnnnnnnnnnnnnnnnnnnnnnnnnnnnnnnnnnnnnnnnnnnnnnnnnnnnnnnnnnnnnnnnnnnnnnnnnnnnnnnnnnnnnnnnnnnnnnnnnnnnnnnnnnnnnnnnnnnnnnnnnnnnnnnnnnnnnnnnnnnnnnnnnnnnnnnnnnnnnnnnnnnnnnnnnnnnnnnnnnnnnnnnnnnnnnnnnnnnnnnnnnnnnnnnnnnnnnnnnnnnnnnnnnnnnnnnnnnnnnnnnnnnnnnnnnnnnnnnnnnnnnnnnnnnnnnnnnnnnnnnnnnnnnnnnnnnnnnnnnnnnnnnnnnnnnnnnnnnnnnnnnnnnnnnnnnnnnnnnnnnnnnnnnnnnnnnnnnnnnnnnnnnnnnnnnnnnnnnnnnnnnnnnnnnnnnnnnnnnnnnnnnnnnnnnnnnnnnnnnnnnnnnnnnnnnnnnnnnnnnnnnnnnnnnnnnnnnnnnnnnnnnnnnnnnnnnnnnnnnnnnnnnnnnnnnnnnnnnnnnnnnnnnnnnnnnnnnnnnnnnnnnnnnnnnnnnnnnnnnnnnnnnnnnnnnnnnnnnnnnnnnnnnnnnnnnnnnnnnnnnnnnnnnnnnnnnnnnnnnnnnnnnnnnnnnnnnnnnnnnnnnnnnnnnnnnnnnnnnnnnnnnnnnnnnnnnnnnnnnnnnnnnnnnnnnnnnnnnnnnnnnnnnnnnnnnnnnnnnnnnnnnnnnnnnnnnnnnnnnnnnnnnnnnnnnnnnnnnnnnnnnnnnnnnnnnnnnnnnnnnnnnnnnnnnnnnnnnnnnnnnnnnnnnnnnnnnnnnnnnnnnnnnnnnnnnnnnnnnnnnnnnnnnnnnnnnnnnnnnnnnnnnnnnnnnnnnnnnnnnnnnnnnnnnnnnnnnnnnnnnnnnnnnnnnnnnnnnnnnnnnnnnnnnnnnnnnnnnnnnnnnnnnnnnnnnnnnnnnnnnnnnnnnnnnnnnnnnnnnnnnnnnnnnnnnnnnnnnnnnnnnnnnnnnnnnnnnnnnnnnnnnnnnnnnnnnnnnnnnnnnnnnnnnnnnnnnnnnnnnnnnnnnnnnnnnnnnnnnnnnnnnnnnnnnnnnnnnnnnnnnnnnnnnnnnnnnnnnnnnnnnnnnnnnnnnnnnnnnnnnnnnnnnnnnnnnnnnnnnnnnnnnnnnnnnnnnnnnnnnnnnnnnnnnnnnnnnnnnnnnnnnnnnnnnnnnnnnnnnnnnnnnnnnnnnnnnnnnnnnnnnnnnnnnnnnnnnnnnnnnnnnnnnnnnnnnnnnnnnnnnnnnnnnnnnnnnnnnnnnnnnnnnnnnnnnnnnnnnnnnnnnnnnnnnnnnnnnnnnnnnnnnnnnnnnnnnnnnnnnnnnnnnnnnnnnnnnnnnnnnnnnnnnnnnnnnnnnnnnnnnnnnnnnnnnnnnnnnnnnnnnnnnnnnnnnnnnnnnnnnnnnnnnnnnnnnnnnnnnnnnnnnnnnnnnnnnnnnnnnnnnnnnnnnnnnnnnnnnnnnnnnnnnnnnnnnnnnnnnnnnnnnnnnnnnnnnnnnnnnnnnnnnnnnnnnnnnnnnnnnnnnnnnnnnnnnnnnnnnnnnnnnnnnnnnnnnnnnnnnnnnnnnnnnnnnnnnnnnnnnnnnnnnnnnnnnnnnnnnnnnnnnnnnnnnnnnnnnnnnnnnnnnnnnnnnnnnnnnnnnnnnnnnnnnnnnnnnnnnnnnnnnnnnnnnnnnnnnnnnnnnnnnnnnnnnnnnnnnnnnnnnnnnnnnnnnnnnnnnnnnnnnnnnnnnnnnnnnnnnnnnnnnnnnnnnnnnnnnnnnnnnnnnnnnnnnnnnnnnnnnnnnnnnnnnnnnnnnnnnnnnnnnnnnnnnnnnnnnnnnnnnnnnnnnnnnnnnnnnnnnnnnnnnnnnnnnnnnnnnnnnnnnnnnnnnnnnnnnnnnnnnnnnnnnnnnnnnnnnnnnnnnnnnnnnnnnnnnnnnnnnnnnnnnnnnnnnnnnnnnnnnnnnnnnnnnnnnnnnnnnnnnnnnnnnnnnnnnnnnnnnnnnnnnnnnnnnnnnnnnnnnnnnnnnnnnnnnnnnnnnnnnnnnnnnnnnnnnnnnnnnnnnnnnnnnnnnnnnnnnnnnnnnnnnnnnnnnnnnnnnnnnnnnnnnnnnnnnnnnnnnnnnnnnnnnnnnnnnnnnnnnnnnnnnnnnnnnnnnnnnnnnnnnnnnnnnnnnnnnnnnnnnnnnnnnnnnnnnnnnnnnnnnnnnnnnnnnnnnnnnnnnnnnnnnnnnnnnnnnnnnnnnnnnnnnnnnnnnnnnnnnnnnnnnnnnnnnnnnnnnnnnnnnnnnnnnnnnnnnnnnnnnnnnnnnnnnnnnnnnnnnnnnnnnnnnnnnnnnnnnnnnnnnnnnnnnnnnnnnnnnnnnnnnnnnnnnnnnnnnnnnnnnnnnnnnnnnnnnnnnnnnnnnnnnnnnnnnnnnnnnnnnnnnnnnnnnnnnnnnnnnnnnnnnnnnnnnnnnnnnnnnnnnnnnnnnnnnnnnnnnnnnnnnnnnnnnnnnnnnnnnnnnnnnnnnnnnnnnnnnnnnnnnnnnnnnnnnnnnnnnnnnnnnnnnnnnnnnnnnnnnnnnnnnnnnnnnnnnnnnnnnnnnnnnnnnnnnnnnnnnnnnnnnnnnnnnnnnnnnnnnnnnnnnnnnnnnnnnnnnnnnnnnnnnnnnnnnnnnnnnnnnnnnnnnnnnnnnnnnnnnnnnnnnnnnnnnnnnnnnnnnnnnnnnnnnnnnnnnnnnnnnnnnnnnnnnnnnnnnnnnnnnnnnnnnnnnnnnnnnnnnnnnnnnnnnnnnnnnnnnnnnnnnnnnnnnnnnnnnnnnnnnnnnnnnnnnnnnnnnnnnnnnnnnnnnnnnnnnnnnnnnnnnnnnnnnnnnnnnnnnnnnnnnnnnnnnnnnnnnnnnnnnnnnnnnnnnnnnnnnnnnnnnnnnnnnnnnnnnnnnnnnnnnnnnnnnnnnnnnnnnnnnnnnnnnnnnnnnnnnnnnnnnnnnnnnnnnnnnnnnnnnnnnnnnnnnnnnnnnnnnnnnnnnnnnnnnnnnnnnnnnnnnnnnnnnnnnnnnnnnnnnnnnnnnnnnnnnnnnnnnnnnnnnnnnnnnnnnnnnnnnnnnnnnnnnnnnnnnnnnnnnnnnnnnnnnnnnnnnnnnnnnnnnnnnnnnnnnnnnnnnnnnnnnnnnnnnnnnnnnnnnnnnnnnnnnnnnnnnnnnnnnnnnnnnnnnnnnnnnnnnnnnnnnnnnnnnnnnnnnnnnnnnnnnnnnnnnnnnnnnnnnnnnnnnnnnnnnnnnnnnnnnnnnnnnnnnnnnnnnnnnnnnnnnnnnnnnnnnnnnnnnnnnnnnnnnnnnnnnnnnnnnnnnnnnnnnnnnnnnnnnnnnnnnnnnnnnnnnnnnnnnnnnnnnnnnnnnnnnnnnnnnnnnnnnnnnnnnnnnnnnnnnnnnnnnnnnnnnnnnnnnnnnnnnnnnnnnnnnnnnnnnnnnnnnnnnnnnnnnnnnnnnnnnnnnnnnnnnnnnnnnnnnnnnnnnnnnnnnnnnnnnnnnnnnnnnnnnnnnnnnnnnnnnnnnnnnnnnnnnnnnnnnnnnnnnnnnnnnnnnnnnnnnnnnnnnnnnnnnnnnnnnnnnnnnnnnnnnnnnnnnnnnnnnnnnnnnnnnnnnnnnnnnnnnnnnnnnnnnnnnnnnnnnnnnnnnnnnnnnnnnnnnnnnnnnnnnnnnnnnnnnnnnnnnnnnnnnnnnnnnnnnnnnnnnnnnnnnnnnnnnnnnnnnnnnnnnnnnnnnnnnnnnnnnnnnnnnnnnnnnnnnnnnnnnnnnnnnnnnnnnnnnnnnnnnnnnnnnnnnnnnnnnnnnnnnnnnnnnnnnnnnnnnnnnnnnnnnnnnnnnnnnnnnnnnnnnnnnnnnnnnnnnnnnnnnnnnnnnnnnnnnnnnnnnnnnnnnnnnnnnnnnnnnnnnnnnnnnnnnnnnnnnnnnnnnnnnnnnnnnnnnnnnnnnnnnnnnnnnnnnnnnnnnnnnnnnnnnnnnnnnnnnnnnnnnnnnnnnnnnnnnnnnnnnnnnnnnnnnnnnnnnnnnnnnnnnnnnnnnnnnnnnnnnnnnnnnnnnnnnnnnnnnnnnnnnnnnnnnnnnnnnnnnnnnnnnnnnnnnnnnnnnnnnnnnnnnnnnnnnnnnnnnnnnnnnnnnnnnnnnnnnnnnnnnnnnnnnnnnnnnnnnnnnnnnnnnnnnnnnnnnnnnnnnnnnnnnnnnnnnnnnnnnnnnnnnnnnnnnnnnnnnnnnnnnnnnnnnnnnnnnnnnnnnnnnnnnnnnnnnnnnnnnnnnnnnnnnnnnnnnnnnnnnnnnnnnnnnnnnnnnnnnnnnnnnnnnnnnnnnnnnnnnnnnnnnnnnnnnnnnnnnnnnnnnnnnnnnnnnnnnnnnnnnnnnnnnnnnnnnnnnnnnnnnnnnnnnnnnnnnnnnnnnnnnnnnnnnnnnnnnnnnnnnnnnnnnnnnnnnnnnnnnnnnnnnnnnnnnnnnnnnnnnnnnnnnnnnnnnnnnnnnnnnnnnnnnnnnnnnnnnnnnnnnnnnnnnnnnnnnnnnnnnnnnnnnnnnnnnnnnnnnnnnnnnnnnnnnnnnnnnnnnnnnnnnnnnnnnnnnnnnnnnnnnnnnnnnnnnnnnnnnnnnnnnnnnnnnnnnnnnnnnnnnnnnnnnnnnnnnnnnnnnnnnnnnnnnnnnnnnnnnnnnnnnnnnnnnnnnnnnnnnnnnnnnnnnnnnnnnnnnnnnnnnnnnnnnnnnnnnnnnnnnnnnnnnnnnnnnnnnnnnnnnnnnnnnnnnnnnnnnnnnnnnnnnnnnnnnnnnnnnnnnnnnnnnnnnnnnnnnnnnnnnnnnnnnnnnnnnnnnnnnnnnnnnnnnnnnnnnnnnnnnnnnnnnnnnnnnnnnnnnnnnnnnnnnnnnnnnnnnnnnnnnnnnnnnnnnnnnnnnnnnnnnnnnnnnnnnnnnnnnnnnnnnnnnnnnnnnnnnnnnnnnnnnnnnnnnnnnnnnnnnnnnnnnnnnnnnnnnnnnnnnnnnnnnnnnnnnnnnnnnnnnnnnnnnnnnnnnnnnnnnnnnnnnnnnnnnnnnnnnnnnnnnnnnnnnnnnnnnnnnnnnnnnnnnnnnnnnnnnnnnnnnnnnnnnnnnnnnnnnnnnnnnnnnnnnnnnnnnnnnnnnnnnnnnnnnnnnnnnnnnnnnnnnnnnnnnnnnnnnnnnnnnnnnnnnnnnnnnnnnnnnnnnnnnnnnnnnnnnnnnnnnnnnnnnnnnnnnnnnnnnnnnnnnnnnnnnnnnnnnnnnnnnnnnnnnnnnnnnnnnnnnnnnnnnnnnnnnnnnnnnnnnnnnnnnnnnnnnnnnnnnnnnnnnnnnnnnnnnnnnnnnnnnnnnnnnnnnnnnnnnnnnnnnnnnnnnnnnnnnnnnnnnnnnnnnnnnnnnnnnnnnnnnnnnnnnnnnnnnnnnnnnnnnnnnnnnnnnnnnnnnnnnnnnnnnnnnnnnnnnnnnnnnnnnnnnnnnnnnnnnnnnnnnnnnnnnnnnnnnnnnnnnnnnnnnnnnnnnnnnnnnnnnnnnnnnnnnnnnnnnnnnnnnnnnnnnnnnnnnnnnnnnnnnnnnnnnnnnnnnnnnnnnnnnnnnnnnnnnnnnnnnnnnnnnnnnnnnnnnnnnnnnnnnnnnnnnnnnnnnnnnnnnnnnnnnnnnnnnnnnnnnnnnnnnnnnnnnnnnnnnnnnnnnnnnnnnnnnnnnnnnnnnnnnnnnnnnnnnnnnnnnnnnnnnnnnnnnnnnnnnnnnnnnnnnnnnnnnnnnnnnnnnnnnnnnnnnnnnnnnnnnnnnnnnnnnnnnnnnnnnnnnnnnnnnnnnnnnnnnnnnnnnnnnnnnnnnnnnnnnnnnnnnnnnnnnnnnnnnnnnnnnnnnnnnnnnnnnnnnnnnnnnnnnnnnnnnnnnnnnnnnnnnnnnnnnnnnnnnnnnnnnnnnnnnnnnnnnnnnnnnnnnnnnnnnnnnnnnnnnnnnnnnnnnnnnnnnnnnnnnnnnnnnnnnnnnnnnnnnnnnnnnnnnnnnnnnnnnnnnnnnnnnnnnnnnnnnnnnnnnnnnnnnnnnnnnnnnnnnnnnnnnnnnnnnnnnnnnnnnnnnnnnnnnnnnnnnnnnnnnnnnnnnnnnnnnnnnnnnnnnnnnnnnnnnnnnnnnnnnnnnnnnnnnnnnnnnnnnnnnnnnnnnnnnnnnnnnnnnnnnnnnnnnnnnnnnnnnnnnnnnnnnnnnnnnnnnnnnnnnnnnnnnnnnnnnnnnnnnnnnnnnnnnnnnnnnnnnnnnnnnnnnnnnnnnnnnnnnnnnnnnnnnnnnnnnnnnnnnnnnnnnnnnnnnnnnnnnnnnnnnnnnnnnnnnnnnnnnnnnnnnnnnnnnnnnnnnnnnnnnnnnnnnnnnnnnnnnnnnnnnnnnnnnnnnnnnnnnnnnnnnnnnnnnnnnnnnnnnnnnnnnnnnnnnnnnnnnnnnnnnnnnnnnnnnnnnnnnnnnnnnnnnnnnnnnnnnnnnnnnnnnnnnnnnnnnnnnnnnnnnnnnnnnnnnnnnnnnnnnnnnnnnnnnnnnnnnnnnnnnnnnnnnnnnnnnnnnnnnnnnnnnnnnnnnnnnnnnnnnnnnnnnnnnnnnnnnnnnnnnnnnnnnnnnnnnnnnnnnnnnnnnnnnnnnnnnnnnnnnnnnnnnnnnnnnnnnnnnnnnnnnnnnnnnnnnnnnnnnnnnnnnnnnnnnnnnnnnnnnnnnnnnnnnnnnnnnnnnnnnnnnnnnnnnnnnnnnnnnnnnnnnnnnnnnnnnnnnnnnnnnnnnnnnnnnnnnnnnnnnnnnnnnnnnnnnnnnnnnnnnnnnnnnnnnnnnnnnnnnnnnnnnnnnnnnnnnnnnnnnnnnnnnnnnnnnnnnnnnnnnnnnnnnnnnnnnnnnnnnnnnnnnnnnnnnnnnnnnnnnnnnnnnnnnnnnnnnnnnnnnnnnnnnnnnnnnnnnnnnnnnnnnnnnnnnnnnnnnnnnnnnnnnnnnnnnnnnnnnnnnnnnnnnnnnnnnnnnnnnnnnnnnnnnnnnnnnnnnnnnnnnnnnnnnnnnnnnnnnnnnnnnnnnnnnnnnnnnnnnnnnnnnnnnnnnnnnnnnnnnnnnnnnnnnnnnnnnnnnnnnnnnnnnnnnnnnnnnnnnnnnnnnnnnnnnnnnnnnnnnnnnnnnnnnnnnnnnnnnnnnnnnnnnnnnnnnnnnnnnnnnnnnnnnnnnnnnnnnnnnnnnnnnnnnnnnnnnnnnnnnnnnnnnnnnnnnnnnnnnnnnnnnnnnnnnnnnnnnnnnnnnnnnnnnnnnnnnnnnnnnnnnnnnnnnnnnnnnnnnnnnnnnnnnnnnnnnnnnnnnnnnnnnnnnnnnnnnnnnnnnnnnnnnnnnnnnnnnnnnnnnnnnnnnnnnnnnnnnnnnnnnnnnnnnnnnnnnnnnnnnnnnnnnnnnnnnnnnnnnnnnnnnnnnnnnnnnnnnnnnnnnnnnnnnnnnnnnnnnnnnnnnnnnnnnnnnnnnnnnnnnnnnnnnnnnnnnnnnnnnnnnnnnnnnnnnnnnnnnnnnnnnnnnnnnnnnnnnnnnnnnnnnnnnnnnnnnnnnnnnnnnnnnnnnnnnnnnnnnnnnnnnnnnnnnnnnnnnnnnnnnnnnnnnnnnnnnnnnnnnnnnnnnnnnnnnnnnnnnnnnnnnnnnnnnnnnnnnnnnnnnnnnnnnnnnnnnnnnnnnnnnnnnnnnnnnnnnnnnnnnnnnnnnnnnnnnnnnnnnnnnnnnnnnnnnnnnnnnnnnnnnnnnnnnnnnnnnnnnnnnnnnnnnnnnnnnnnnnnnnnnnnnnnnnnnnnnnnnnnnnnnnnnnnnnnnnnnnnnnnnnnnnnnnnnnnnnnnnnnnnnnnnnnnnnnnnnnnnnnnnnnnnnnnnnnnnnnnnnnnnnnnnnnnnnnnnnnnnnnnnnnnnnnnnnnnnnnnnnnnnnnnnnnnnnnnnnnnnnnnnnnnnnnnnnnnnnnnnnnnnnnnnnnnnnnnnnnnnnnnnnnnnnnnnnnnnnnnnnnnnnnnnnnnnnnnnnnnnnnnnnnnnnnnnnnnnnnnnnnnnnnnnnnnnnnnnnnnnnnnnnnnnnnnnnnnnnnnnnnnnnnnnnnnnnnnnnnnnnnnnnnnnnnnnnnnnnnnnnnnnnnnnnnnnnnnnnnnnnnnnnnnnnnnnnnnnnnnnnnnnnnnnnnnnnnnnnnnnnnnnnnnnnnnnnnnnnnnnnnnnnnnnnnnnnnnnnnnnnnnnnnnnnnnnnnnnnnnnnnnnnnnnnnnnnnnnnnnnnnnnnnnnnnnnnnnnnnnnnnnnnnnnnnnnnnnnnnnnnnnnnnnnnnnnnnnnnnnnnnnnnnnnnnnnnnnnnnnnnnnnnnnnnnnnnnnnnnnnnnnnnnnnnnnnnnnnnnnnnnnnnnnnnnnnnnnnnnnnnnnnnnnnnnnnnnnnnnnnnnnnnnnnnnnnnnnnnnnnnnnnnnnnnnnnnnnnnnnnnnnnnnnnnnnnnnnnnnnnnnnnnnnnnnnnnnnnnnnnnnnnnnnnnnnnnnnnnnnnnnnnnnnnnnnnnnnnnnnnnnnnnnnnnnnnnnnnnnnnnnnnnnnnnnnnnnnnnnnnnnnnnnnnnnnnnnnnnnnnnnnnnnnnnnnnnnnnnnnnnnnnnnnnnnnnnnnnnnnnnnnnnnnnnnnnnnnnnnnnnnnnnnnnnnnnnnnnnnnnnnnnnnnnnnnnnnnnnnnnnnnnnnnnnnnnnnnnnnnnnnnnnnnnnnnnnnnnnnnnnnnnnnnnnnnnnnnnnnnnnnnnnnnnnnnnnnnnnnnnnnnnnnnnnnnnnnnnnnnnnnnnnnnnnnnnnnnnnnnnnnnnnnnnnnnnnnnnnnnnnnnnnnnnnnnnnnnnnnnnnnnnnnnnnnnnnnnnnnnnnnnnnnnnnnnnnnnnnnnnnnnnnnnnnnnnnnnnnnnnnnnnnnnnnnnnnnnnnnnnnnnnnnnnnnnnnnnnnnnnnnnnnnnnnnnnnnnnnnnnnnnnnnnnnnnnnnnnnnnnnnnnnnnnnnnnnnnnnnnnnnnnnnnnnnnnnnnnnnnnnnnnnnnnnnnnnnnnnnnnnnnnnnnnnnnnnnnnnnnnnnnnnnnnnnnnnnnnnnnnnnnnnnnnnnnnnnnnnnnnnnnnnnnnnnnnnnnnnnnnnnnnnnnnnnnnnnnnnnnnnnnnnnnnnnnnnnnnnnnnnnnnnnnnnnnnnnnnnnnnnnnnnnnnnnnnnnnnnnnnnnnnnnnnnnnnnnnnnnnnnnnnnnnnnnnnnnnnnnnnnnnnnnnnnnnnnnnnnnnnnnnnnnnnnnnnnnnnnnnnnnnnnnnnnnnnnnnnnnnnnnnnnnnnnnnnnnnnnnnnnnnnnnnnnnnnnnnnnnnnnnnnnnnnnnnnnnnnnnnnnnnnnnnnnnnnnnnnnnnnnnnnnnnnnnnnnnnnnnnnnnnnnnnnnnnnnnnnnnnnnnnnnnnnnnnnnnnnnnnnnnnnnnnnnnnnnnnnnnnnnnnnnnnnnnnnnnnnnnnnnnnnnnnnnnnnnnnnnnnnnnnnnnnnnnnnnnnnnnnnnnnnnnnnnnnnnnnnnnnnnnnnnnnnnnnnnnnnnnnnnnnnnnnnnnnnnnnnnnnnnnnnnnnnnnnnnnnnnnnnnnnnnnnnnnnnnnnnnnnnnnnnnnnnnnnnnnnnnnnnnnnnnnnnnnnnnnnnnnnnnnnnnnnnnnnnnnnnnnnnnnnnnnnnnnnnnnnnnnnnnnnnnnnnnnnnnnnnnnnnnnnnnnnnnnnnnnnnnnnnnnnnnnnnnnnnnnnnnnnnnnnnnnnnnnnnnnnnnnnnnnnnnnnnnnnnnnnnnnnnnnnnnnnnnnnnnnnnnnnnnnnnnnnnnnnnnnnnnnnnnnnnnnnnnnnnnnnnnnnnnnnnnnnnnnnnnnnnnnnnnnnnnnnnnnnnnnnnnnnnnnnnnnnnnnnnnnnnnnnnnnnnnnnnnnnnnnnnnnnnnnnnnnnnnnnnnnnnnnnnnnnnnnnnnnnnnnnnnnnnnnnnnnnnnnnnnnnnnnnnnnnnnnnnnnnnnnnnnnnnnnnnnnnnnnnnnnnnnnnnnnnnnnnnnnnnnnnnnnnnnnnnnnnnnnnnnnnnnnnnnnnnnnnnnnnnnnnnnnnnnnnnnnnnnnnnnnnnnnnnnnnnnnnnnnnnnnnnnnnnnnnnnnnnnnnnnnnnnnnnnnnnnnnnnnnnnnnnnnnnnnnnnnnnnnnnnnnnnnnnnnnnnnnnnnnnnnnnnnnnnnnnnnnnnnnnnnnnnnnnnnnnnnnnnnnnnnnnnnnnnnnnnnnnnnnnnnnnnnnnnnnnnnnnnnnnnnnnnnnnnnnnnnnnnnnnnnnnnnnnnnnnnnnnnnnnnnnnnnnnnnnnnnnnnnnnnnnnnnnnnnnnnnnnnnnnnnnnnnnnnnnnnnnnnnnnnnnnnnnnnnnnnnnnnnnnnnnnnnnnnnnnnnnnnnnnnnnnnnnnnnnnnnnnnnnnnnnnnnnnnnnnnnnnnnnnnnnnnnnnnnnnnnnnnnnnnnnnnnnnnnnnnnnnnnnnnnnnnnnnnnnnnnnnnnnnnnnnnnnnnnnnnnnnnnnnnnnnnnnnnnnnnnnnnnnnnnnnnnnnnnnnnnnnnnnnnnnnnnnnnnnnnnnnnnnnnnnnnnnnnnnnnnnnnnnnnnnnnnnnnnnnnnnnnnnnnnnnnnnnnnnnnnnnnnnnnnnnnnnnnnnnnnnnnnnnnnnnnnnnnnnnnnnnnnnnnnnnnnnnnnnnnnnnnnnnnnnnnnnnnnnnnnnnnnnnnnnnnnnnnnnnnnnnnnnnnnnnnnnnnnnnnnnnnnnnnnnnnnnnnnnnnnnnnnnnnnnnnnnnnnnnnnnnnnnnnnnnnnnnnnnnnnnnnnnnnnnnnnnnnnnnnnnnnnnnnnnnnnnnnnnnnnnnnnnnnnnnnnnnnnnnnnnnnnnnnnnnnnnnnnnnnnnnnnnnnnnnnnnnnnnnnnnnnnnnnnnnnnnnnnnnnnnnnnnnnnnnnnnnnnnnnnnnnnnnnnnnnnnnnnnnnnnnnnnnnnnnnnnnnnnnnnnnnnnnnnnnnnnnnnnnnnnnnnnnnnnnnnnnnnnnnnnnnnnnnnnnnnnnnnnnnnnnnnnnnnnnnnnnnnnnnnnnnnnnnnnnnnnnnnnnnnnnnnnnnnnnnnnnnnnnnnnnnnnnnnnnnnnnnnnnnnnnnnnnnnnnnnnnnnnnnnnnnnnnnnnnnnnnnnnnnnnnnnnnnnnnnnnnnnnnnnnnnnnnnnnnnnnnnnnnnnnnnnnnnnnnnnnnnnnnnnnnnnnnnnnnnnnnnnnnnnnnnnnnnnnnnnnnnnnnnnnnnnnnnnnnnnnnnnnnnnnnnnnnnnnnnnnnnnnnnnnnnnnnnnnnnnnnnnnnnnnnnnnnnnnnnnnnnnnnnnnnnnnnnnnnnnnnnnnnnnnnnnnnnnnnnnnnnnnnnnnnnnnnnnnnnnnnnnnnnnnnnnnnnnnnnnnnnnnnnnnnnnnnnnnnnnnnnnnnnnnnnnnnnnnnnnnnnnnnnnnnnnnnnnnnnnnnnnnnnnnnnnnnnnnnnnnnnnnnnnnnnnnnnnnnnnnnnnnnnnnnnnnnnnnnnnnnnnnnnnnnnnnnnnnnnnnnnnnnnnnnnnnnnnnnnnnnnnnnnnnnnnnnnnnnnnnnnnnnnnnnnnnnnnnnnnnnnnnnnnnnnnnnnnnnnnnnnnnnnnnnnnnnnnnnnnnnnnnnnnnnnnnnnnnnnnnnnnnnnnnnnnnnnnnnnnnnnnnnnnnnnnnnnnnnnnnnnnnnnnnnnnnnnnnnnnnnnnnnnnnnnnnnnnnnnnnnnnnnnnnnnnnnnnnnnnnnnnnnnnnnnnnnnnnnnnnnnnnnnnnnnnnnnnnnnnnnnnnnnnnnnnnnnnnnnnnnnnnnnnnnnnnnnnnnnnnnnnnnnnnnnnnnnnnnnnnnnnnnnnnnnnnnnnnnnnnnnnnnnnnnnnnnnnnnnnnnnnnnnnnnnnnnnnnnnnnnnnnnnnnnnnnnnnnnnnnnnnnnnnnnnnnnnnnnnnnnnnnnnnnnnnnnnnnnnnnnnnnnnnnnnnnnnnnnnnnnnnnnnnnnnnnnnnnnnnnnnnnnnnnnnnnnnnnnnnnnnnnnnnnnnnnnnnnnnnnnnnnnnnnnnnnnnnnnnnnnnnnnnnnnnnnnnnnnnnnnnnnnnnnnnnnnnnnnnnnnnnnnnnnnnnnnnnnnnnnnnnnnnnnnnnnnnnnnnnnnnnnnnnnnnnnnnnnnnnnnnnnnnnnnnnnnnnnnnnnnnnnnnnnnnnnnnnnnnnnnnnnnnnnnnnnnnnnnnnnnnnnnnnnnnnnnnnnnnnnnnnnnnnnnnnnnnnnnnnnnnnnnnnnnnnnnnnnnnnnnnnnnnnnnnnnnnnnnnnnnnnnnnnnnnnnnnnnnnnnnnnnnnnnnnnnnnnnnnnnnnnnnnnnnnnnnnnnnnnnnnnnnnnnnnnnnnnnnnnnnnnnnnnnnnnnnnnnnnnnnnnnnnnnnnnnnnnnnnnnnnnnnnnnnnnnnnnnnnnnnnnnnnnnnnnnnnnnnnnnnnnnnnnnnnnnnnnnnnnnnnnnnnnnnnnnnnnnnnnnnnnnnnnnnnnnnnnnnnnnnnnnnnnnnnnnnnnnnnnnnnnnnnnnnnnnnnnnnnnnnnnnnnnnnnnnnnnnnnnnnnnnnnnnnnnnnnnnnnnnnnnnnnnnnnnnnnnnnnnnnnnnnnnnnnnnnnnnnnnnnnnnnnnnnnnnnnnnnnnnnnnnnnnnnnnnnnnnnnnnnnnnnnnnnnnnnnnnnnnnnnnnnnnnnnnnnnnnnnnnnnnnnnnnnnnnnnnnnnnnnnnnnnnnnnnnnnnnnnnnnnnnnnnnnnnnnnnnnnnnnnnnnnnnnnnnnnnnnnnnnnnnnnnnnnnnnnnnnnnnnnnnnnnnnnnnnnnnnnnnnnnnnnnnnnnnnnnnnnnnnnnnnnnnnnnnnnnnnnnnnnnnnnnnnnnnnnnnnnnnnnnnnnnnnnnnnnnnnnnnnnnnnnnnnnnnnnnnnnnnnnnnnnnnnnnnnnnnnnnnnnnnnnnnnnnnnnnnnnnnnnnnnnnnnnnnnnnnnnnnnnnnnnnnnnnnnnnnnnnnnnnnnnnnnnnnnnnnnnnnnnnnnnnnnnnnnnnnnnnnnnnnnnnnnnnnnnnnnnnnnnnnnnnnnnnnnnnnnnnnnnnnnnnnnnnnnnnnnnnnnnnnnnnnnnnnnnnnnnnnnnnnnnnnnnnnnnnnnnnnnnnnnnnnnnnnnnnnnnnnnnnnnnnnnnnnnnnnnnnnnnnnnnnnnnnnnnnnnnnnnnnnnnnnnnnnnnnnnnnnnnnnnnnnnnnnnnnnnnnnnnnnnnnnnnnnnnnnnnnnnnnnnnnnnnnnnnnnnnnnnnnnnnnnnnnnnnnnnnnnnnnnnnnnnnnnnnnnnnnnnnnnnnnnnnnnnnnnnnnnnnnnnnnnnnnnnnnnnnnnnnnnnnnnnnnnnnnnnnnnnnnnnnnnnnnnnnnnnnnnnnnnnnnnnnnnnnnnnnnnnnnnnnnnnnnnnnnnnnnnnnnnnnnnnnnnnnnnnnnnnnnnnnnnnnnnnnnnnnnnnnnnnnnnnnnnnnnnnnnnnnnnnnnnnnnnnnnnnnnnnnnnnnnnnnnnnnnnnnnnnnnnnnnnnnnnnnnnnnnnnnnnnnnnnnnnnnnnnnnnnnnnnnnnnnnnnnnnnnnnnnnnnnnnnnnnnnnnnnnnnnnnnnnnnnnnnnnnnnnnnnnnnnnnnnnnnnnnnnnnnnnnnnnnnnnnnnnnnnnnnnnnnnnnnnnnnnnnnnnnnnnnnnnnnnnnnnnnnnnnnnnnnnnnnnnnnnnnnnnnnnnnnnnnnnnnnnnnnnnnnnnnnnnnnnnnnnnnnnnnnnnnnnnnnnnnnnnnnnnnnnnnnnnnnnnnnnnnnnnnnnnnnnnnnnnnnnnnnnnnnnnnnnnnnnnnnnnnnnnnnnnnnnnnnnnnnnnnnnnnnnnnnnnnnnnnnnnnnnnnnnnnnnnnnnnnnnnnnnnnnnnnnnnnnnnnnnnnnnnnnnnnnnnnnnnnnnnnnnnnnnnnnnnnnnnnnnnnnnnnnnnnnnnnnnnnnnnnnnnnnnnnnnnnnnnnnnnnnnnnnnnnnnnnnnnnnnnnnnnnnnnnnnnnnnnnnnnnnnnnnnnnnnnnnnnnnnnnnnnnnnnnnnnnnnnnnnnnnnnnnnnnnnnnnnnnnnnnnnnnnnnnnnnnnnnnnnnnnnnnnnnnnnnnnnnnnnnnnnnnnnnnnnnnnnnnnnnnnnnnnnnnnnnnnnnnnnnnnnnnnnnnnnnnnnnnnnnnnnnnnnnnnnnnnnnnnnnnnnnnnnnnnnnnnnnnnnnnnnnnnnnnnnnnnnnnnnnnnnnnnnnnnnnnnnnnnnnnnnnnnnnnnnnnnnnnnnnnnnnnnnnnnnnnnnnnnnnnnnnnnnnnnnnnnnnnnnnnnnnnnnnnnnnnnnnnnnnnnnnnnnnnnnnnnnnnnnnnnnnnnnnnnnnnnnnnnnnnnnnnnnnnnnnnnnnnnnnnnnnnnnnnnnnnnnnnnnnnnnnnnnnnnnnnnnnnnnnnnnnnnnnnnnnnnnnnnnnnnnnnnnnnnnnnnnnnnnnnnnnnnnnnnnnnnnnnnnnnnnnnnnnnnnnnnnnnnnnnnnnnnnnnnnnnnnnnnnnnnnnnnnnnnnnnnnnnnnnnnnnnnnnnnnnnnnnnnnnnnnnnnnnnnnnnnnnnnnnnnnnnnnnnnnnnnnnnnnnnnnnnnnnnnnnnnnnnnnnnnnnnnnnnnnnnnnnnnnnnnnnnnnnnnnnnnnnnnnnnnnnnnnnnnnnnnnnnnnnnnnnnnnnnnnnnnnnnnnnnnnnnnnnnnnnnnnnnnnnnnnnnnnnnnnnnnnnnnnnnnnnnnnnnnnnnnnnnnnnnnnnnnnnnnnnnnnnnnnnnnnnnnnnnnnnnnnnnnnnnnnnnnnnnnnnnnnnnnnnnnnnnnnnnnnnnnnnnnnnnnnnnnnnnnnnnnnnnnnnnnnnnnnnnnnnnnnnnnnnnnnnnnnnnnnnnnnnnnnnnnnnnnnnnnnnnnnnnnnnnnnnnnnnnnnnnnnnnnnnnnnnnnnnnnnnnnnnnnnnnnnnnnnnnnnnnnnnnnnnnnnnnnnnnnnnnnnnnnnnnnnnnnnnnnnnnnnnnnnnnnnnnnnnnnnnnnnnnnnnnnnnnnnnnnnnnnnnnnnnnnnnnnnnnnnnnnnnnnnnnnnnnnnnnnnnnnnnnnnnnnnnnnnnnnnnnnnnnnnnnnnnnnnnnnnnnnnnnnnnnnnnnnnnnnnnnnnnnnnnnnnnnnnnnnnnnnnnnnnnnnnnnnnnnnnnnnnnnnnnnnnnnnnnnnnnnnnnnnnnnnnnnnnnnnnnnnnnnnnnnnnnnnnnnnnnnnnnnnnnnnnnnnnnnnnnnnnnnnnnnnnnnnnnnnnnnnnnnnnnnnnnnnnnnnnnnnnnnnnnnnnnnnnnnnnnnnnnnnnnnnnnnnnnnnnnnnnnnnnnnnnnnnnnnnnnnnnnnnnnnnnnnnnnnnnnnnnnnnnnnnnnnnnnnnnnnnnnnnnnnnnnnnnnnnnnnnnnnnnnnnnnnnnnnnnnnnnnnnnnnnnnnnnnnnnnnnnnnnnnnnnnnnnnnnnnnnnnnnnnnnnnnnnnnnnnnnnnnnnnnnnnnnnnnnnnnnnnnnnnnnnnnnnnnnnnnnnnnnnnnnnnnnnnnnnnnnnnnnnnnnnnnnnnnnnnnnnnnnnnnnnnnnnnnnnnnnnnnnnnnnnnnnnnnnnnnnnnnnnnnnnnnnnnnnnnnnnnnnnnnnnnnnnnnnnnnnnnnnnnnnnnnnnnnnnnnnnnnnnnnnnnnnnnnnnnnnnnnnnnnnnnnnnnnnnnnnnnnnnnnnnnnnnnnnnnnnnnnnnnnnnnnnnnnnnnnnnnnnnnnnnnnnnnnnnnnnnnnnnnnnnnnnnnnnnnnnnnnnnnnnnnnnnnnnnnnnnnnnnnnnnnnnnnnnnnnnnnnnnnnnnnnnnnnnnnnnnnnnnnnnnnnnnnnnnnnnnnnnnnnnnnnnnnnnnnnnnnnnnnnnnnnnnnnnnnnnnnnnnnnnnnnnnnnnnnnnnnnnnnnnnnnnnnnnnnnnnnnnnnnnnnnnnnnnnnnnnnnnnnnnnnnnnnnnnnnnnnnnnnnnnnnnnnnnnnnnnnnnnnnnnnnnnnnnnnnnnnnnnnnnnnnnnnnnnnnnnnnnnnnnnnnnnnnnnnnnnnnnnnnnnnnnnnnnnnnnnnnnnnnnnnnnnnnnnnnnnnnnnnnnnnnnnnnnnnnnnnnnnnnnnnnnnnnnnnnnnnnnnnnnnnnnnnnnnnnnnnnnnnnnnnnnnnnnnnnnnnnnnnnnnnnnnnnnnnnnnnnnnnnnnnnnnnnnnnnnnnnnnnnnnnnnnnnnnnnnnnnnnnnnnnnnnnnnnnnnnnnnnnnnnnnnnnnnnnnnnnnnnnnnnnnnnnnnnnnnnnnnnnnnnnnnnnnnnnnnnnnnnnnnnnnnnnnnnnnnnnnnnnnnnnnnnnnnnnnnnnnnnnnnnnnnnnnnnnnnnnnnnnnnnnnnnnnnnnnnnnnnnnnnnnnnnnnnnnnnnnnnnnnnnnnnnnnnnnnnnnnnnnnnnnnnnnnnnnnnnnnnnnnnnnnnnnnnnnnnnnnnnnnnnnnnnnnnnnnnnnnnnnnnnnnnnnnnnnnnnnnnnnnnnnnnnnnnnnnnnnnnnnnnnnnnnnnnnnnnnnnnnnnnnnnnnnnnnnnnnnnnnnnnnnnnnnnnnnnnnnnnnnnnnnnnnnnnnnnnnnnnnnnnnnnnnnnnnnnnnnnnnnnnnnnnnnnnnnnnnnnnnnnnnnnnnnnnnnnnnnnnnnnnnnnnnnnnnnnnnnnnnnnnnnnnnnnnnnnnnnnnnnnnnnnnnnnnnnnnnnnnnnnnnnnnnnnnnnnnnnnnnnnnnnnnnnnnnnnnnnnnnnnnnnnnnnnnnnnnnnnnnnnnnnnnnnnnnnnnnnnnnnnnnnnnnnnnnnnnnnnnnnnnnnnnnnnnnnnnnnnnnnnnnnnnnnnnnnnnnnnnnnnnnnnnnnnnnnnnnnnnnnnnnnnnnnnnnnnnnnnnnnnnnnnnnnnnnnnnnnnnnnnnnnnnnnnnnnnnnnnnnnnnnnnnnnnnnnnnnnnnnnnnnnnnnnnnnnnnnnnnnnnnnnnnnnnnnnnnnnnnnnnnnnnnnnnnnnnnnnnnnnnnnnnnnnnnnnnnnnnnnnnnnnnnnnnnnnnnnnnnnnnnnnnnnnnnnnnnnnnnnnnnnnnnnnnnnnnnnnnnnnnnnnnnnnnnnnnnnnnnnnnnnnnnnnnnnnnnnnnnnnnnnnnnnnnnnnnnnnnnnnnnnnnnnnnnnnnnnnnnnnnnnnnnnnnnnnnnnnnnnnnnnnnnnnnnnnnnnnnnnnnnnnnnnnnnnnnnnnnnnnnnnnnnnnnnnnnnnnnnnnnnnnnnnnnnnnnnnnnnnnnnnnnnnnnnnnnnnnnnnnnnnnnnnnnnnnnnnnnnnnnnnnnnnnnnnnnnnnnnnnnnnnnnnnnnnnnnnnnnnnnnnnnnnnnnnnnnnnnnnnnnnnnnnnnnnnnnnnnnnnnnnnnnnnnnnnnnnnnnnnnnnnnnnnnnnnnnnnnnnnnnnnnnnnnnnnnnnnnnnnnnnnnnnnnnnnnnnnnnnnnnnnnnnnnnnnnnnnnnnnnnnnnnnnnnnnnnnnnnnnnnnnnnnnnnnnnnnnnnnnnnnnnnnnnnnnnnnnnnnnnnnnnnnnnnnnnnnnnnnnnnnnnnnnnnnnnnnnnnnnnnnnnnnnnnnnnnnnnnnnnnnnnnnnnnnnnnnnnnnnnnnnnnnnnnnnnnnnnnnnnnnnnnnnnnnnnnnnnnnnnnnnnnnnnnnnnnnnnnnnnnnnnnnnnnnnnnnnnnnnnnnnnnnnnnnnnnnnnnnnnnnnnnnnnnnnnnnnnnnnnnnnnnnnnnnnnnnnnnnnnnnnnnnnnnnnnnnnnnnnnnnnnnnnnnnnnnnnnnnnnnnnnnnnnnnnnnnnnnnnnnnnnnnnnnnnnnnnnnnnnnnnnnnnnnnnnnnnnnnnnnnnnnnnnnnnnnnnnnnnnnnnnnnnnnnnnnnnnnnnnnnnnnnnnnnnnnnnnnnnnnnnnnnnnnnnnnnnnnnnnnnnnnnnnnnnnnnnnnnnnnnnnnnnnnnnnnnnnnnnnnnnnnnnnnnnnnnnnnnnnnnnnnnnnnnnnnnnnnnnnnnnnnnnnnnnnnnnnnnnnnnnnnnnnnnnnnnnnnnnnnnnnnnnnnnnnnnnnnnnnnnnnnnnnnnnnnnnnnnnnnnnnnnnnnnnnnnnnnnnnnnnnnnnnnnnnnnnnnnnnnnnnnnnnnnnnnnnnnnnnnnnnnnnnnnnnnnnnnnnnnnnnnnnnnnnnnnnnnnnnnnnnnnnnnnnnnnnnnnnnnnnnnnnnnnnnnnnnnnnnnnnnnnnnnnnnnnnnnnnnnnnnnnnnnnnnnnnnnnnnnnnnnnnnnnnnnnnnnnnnnnnnnnnnnnnnnnnnnnnnnnnnnnnnnnnnnnnnnnnnnnnnnnnnnnnnnnnnnnnnnnnnnnnnnnnnnnnnnnnnnnnnnnnnnnnnnnnnnnnnnnnnnnnnnnnnnnnnnnnnnnnnnnnnnnnnnnnnnnnnnnnnnnnnnnnnnnnnnnnnnnnnnnnnnnnnnnnnnnnnnnnnnnnnnnnnnnnnnnnnnnnnnnnnnnnnnnnnnnnnnnnnnnnnnnnnnnnnnnnnnnnnnnnnnnnnnnnnnnnnnnnnnnnnnnnnnnnnnnnnnnnnnnnnnnnnnnnnnnnnnnnnnnnnnnnnnnnnnnnnnnnnnnnnnnnnnnnnnnnnnnnnnnnnnnnnnnnnnnnnnnnnnnnnnnnnnnnnnnnnnnnnnnnnnnnnnnnnnnnnnnnnnnnnnnnnnnnnnnnnnnnnnnnnnnnnnnnnnnnnnnnnnnnnnnnnnnnnnnnnnnnnnnnnnnnnnnnnnnnnnnnnnnnnnnnnnnnnnnnnnnnnnnnnnnnnnnnnnnnnnnnnnnnnnnnnnnnnnnnnnnnnnnnnnnnnnnnnnnnnnnnnnnnnnnnnnnnnnnnnnnnnnnnnnnnnnnnnnnnnnnnnnnnnnnnnnnnnnnnnnnnnnnnnnnnnnnnnnnnnnnnnnnnnnnnnnnnnnnnnnnnnnnnnnnnnnnnnnnnnnnnnnnnnnnnnnnnnnnnnnnnnnnnnnnnnnnnnnnnnnnnnnnnnnnnnnnnnnnnnnnnnnnnnnnnnnnnnnnnnnnnnnnnnnnnnnnnnnnnnnnnnnnnnnnnnnnnnnnnnnnnnnnnnnnnnnnnnnnnnnnnnnnnnnnnnnnnnnnnnnnnnnnnnnnnnnnnnnnnnnnnnnnnnnnnnnnnnnnnnnnnnnnnnnnnnnnnnnnnnnnnnnnnnnnnnnnnnnnnnnnnnnnnnnnnnnnnnnnnnnnnnnnnnnnnnnnnnnnnnnnnnnnnnnnnnnnnnnnnnnnnnnnnnnnnnnnnnnnnnnnnnnnnnnnnnnnnnnnnnnnnnnnnnnnnnnnnnnnnnnnnnnnnnnnnnnnnnnnnnnnnnnnnnnnnnnnnnnnnnnnnnnnnnnnnnnnnnnnnnnnnnnnnnnnnnnnnnnnnnnnnnnnnnnnnnnnnnnnnnnnnnnnnnnnnnnnnnnnnnnnnnnnnnnnnnnnnnnnnnnnnnnnnnnnnnnnnnnnnnnnnnnnnnnnnnnnnnnnnnnnnnnnnnnnnnnnnnnnnnnnnnnnnnnnnnnnnnnnnnnnnnnnnnnnnnnnnnnnnnnnnnnnnnnnnnnnnnnnnnnnnnnnnnnnnnnnnnnnnnnnnnnnnnnnnnnnnnnnnnnnnnnnnnnnnnnnnnnnnnnnnnnnnnnnnnnnnnnnnnnnnnnnnnnnnnnnnnnnnnnnnnnnnnnnnnnnnnnnnnnnnnnnnnnnnnnnnnnnnnnnnnnnnnnnnnnnnnnnnnnnnnnnnnnnnnnnnnnnnnnnnnnnnnnnnnnnnnnnnnnnnnnnnnnnnnnnnnnnnnnnnnnnnnnnnnnnnnnnnnnnnnnnnnnnnnnnnnnnnnnnnnnnnnnnnnnnnnnnnnnnnnnnnnnnnnnnnnnnnnnnnnnnnnnnnnnnnnnnnnnnnnnnnnnnnnnnnnnnnnnnnnnnnnnnnnnnnnnnnnnnnnnnnnnnnnnnnnnnnnnnnnnnnnnnnnnnnnnnnnnnnnnnnnnnnnnnnnnnnnnnnnnnnnnnnnnnnnnnnnnnnnnnnnnnnnnnnnnnnnnnnnnnnnnnnnnnnnnnnnnnnnnnnnnnnnnnnnnnnnnnnnnnnnnnnnnnnnnnnnnnnnnnnnnnnnnnnnnnnnnnnnnnnnnnnnnnnnnnnnnnnnnnnnnnnnnnnnnnnnnnnnnnnnnnnnnnnnnnnnnnnnnnnnnnnnnnnnnnnnnnnnnnnnnnnnnnnnnnnnnnnnnnnnnnnnnnnnnnnnnnnnnnnnnnnnnnnnnnnnnnnnnnnnnnnnnnnnnnnnnnnnnnnnnnnnnnnnnnnnnnnnnnnnnnnnnnnnnnnnnnnnnnnnnnnnnnnnnnnnnnnnnnnnnnnnnnnnnnnnnnnnnnnnnnnnnnnnnnnnnnnnnnnnnnnnnnnnnnnnnnnnnnnnnnnnnnnnnnnnnnnnnnnnnnnnnnnnnnnnnnnnnnnnnnnnnnnnnnnnnnnnnnnnnnnnnnnnnnnnnnnnnnnnnnnnnnnnnnnnnnnnnnnnnnnnnnnnnnnnnnnnnnnnnnnnnnnnnnnnnnnnnnnnnnnnnnnnnnnnnnnnnnnnnnnnnnnnnnnnnnnnnnnnnnnnnnnnnnnnnnnnnnnnnnnnnnnnnnnnnnnnnnnnnnnnnnnnnnnnnnnnnnnnnnnnnnnnnnnnnnnnnnnnnnnnnnnnnnnnnnnnnnnnnnnnnnnnnnnnnnnnnnnnnnnnnnnnnnnnnnnnnnnnnnnnnnnnnnnnnnnnnnnnnnnnnnnnnnnnnnnnnnnnnnnnnnnnnnnnnnnnnnnnnnnnnnnnnnnnnnnnnnnnnnnnnnnnnnnnnnnnnnnnnnnnnnnnnnnnnnnnnnnnnnnnnnnnnnnnnnnnnnnnnnnnnnnnnnnnnnnnnnnnnnnnnnnnnnnnnnnnnnnnnnnnnnnnnnnnnnnnnnnnnnnnnnnnnnnnnnnnnnnnnnnnnnnnnnnnnnnnnnnnnnnnnnnnnnnnnnnnnnnnnnnnnnnnnnnnnnnnnnnnnnnnnnnnnnnnnnnnnnnnnnnnnnnnnnnnnnnnnnnnnnnnnnnnnnnnnnnnnnnnnnnnnnnnnnnnnnnnnnnnnnnnnnnnnnnnnnnnnnnnnnnnnnnnnnnnnnnnnnnnnnnnnnnnnnnnnnnnnnnnnnnnnnnnnnnnnnnnnnnnnnnnnnnnnnnnnnnnnnnnnnnnnnnnnnnnnnnnnnnnnnnnnnnnnnnnnnnnnnnnnnnnnnnnnnnnnnnnnnnnnnnnnnnnnnnnnnnnnnnnnnnnnnnnnnnnnnnnnnnnnnnnnnnnnnnnnnnnnnnnnnnnnnnnnnnnnnnnnnnnnnnnnnnnnnnnnnnnnnnnnnnnnnnnnnnnnnnnnnnnnnnnnnnnnnnnnnnnnnnnnnnnnnnnnnnnnnnnnnnnnnnnnnnnnnnnnnnnnnnnnnnnnnnnnnnnnnnnnnnnnnnnnnnnnnnnnnnnnnnnnnnnnnnnnnnnnnnnnnnnnnnnnnnnnnnnnnnnnnnnnnnnnnnnnnnnnnnnnnnnnnnnnnnnnnnnnnnnnnnnnnnnnnnnnnnnnnnnnnnnnnnnnnnnnnnnnnnnnnnnnnnnnnnnnnnnnnnnnnnnnnnnnnnnnnnnnnnnnnnnnnnnnnnnnnnnnnnnnnnnnnnnnnnnnnnnnnnnnnnnnnnnnnnnnnnnnnnnnnnnnnnnnnnnnnnnnnnnnnnnnnnnnnnnnnnnnnnnnnnnnnnnnnnnnnnnnnnnnnnnnnnnnnnnnnnnnnnnnnnnnnnnnnnnnnnnnnnnnnnnnnnnnnnnnnnnnnnnnnnnnnnnnnnnnnnnnnnnnnnnnnnnnnnnnnnnnnnnnnnnnnnnnnnnnnnnnnnnnnnnnnnnnnnnnnnnnnnnnnnnnnnnnnnnnnnnnnnnnnnnnnnnnnnnnnnnnnnnnnnnnnnnnnnnnnnnnnnnnnnnnnnnnnnnnnnnnnnnnnnnnnnnnnnnnnnnnnnnnnnnnnnnnnnnnnnnnnnnnnnnnnnnnnnnnnnnnnnnnnnnnnnnnnnnnnnnnnnnnnnnnnnnnnnnnnnnnnnnnnnnnnnnnnnnnnnnnnnnnnnnnnnnnnnnnnnnnnnnnnnnnnnnnnnnnnnnnnnnnnnnnnnnnnnnnnnnnnnnnnnnnnnnnnnnnnnnnnnnnnnnnnnnnnnnnnnnnnnnnnnnnnnnnnnnnnnnnnnnnnnnnnnnnnnnnnnnnnnnnnnnnnnnnnnnnnnnnnnnnnnnnnnnnnnnnnnnnnnnnnnnnnnnnnnnnnnnnnnnnnnnnnnnnnnnnnnnnnnnnnnnnnnnnnnnnnnnnnnnnnnnnnnnnnnnnnnnnnnnnnnnnnnnnnnnnnnnnnnnnnnnnnnnnnnnnnnnnnnnnnnnnnnnnnnnnnnnnnnnnnnnnnnnnnnnnnnnnnnnnnnnnnnnnnnnnnnnnnnnnnnnnnnnnnnnnnnnnnnnnnnnnnnnnnnnnnnnnnnnnnnnnnnnnnnnnnnnnnnnnnnnnnnnnnnnnnnnnnnnnnnnnnnnnnnnnnnnnnnnnnnnnnnnnnnnnnnnnnnnnnnnnnnnnnnnnnnnnnnnnnnnnnnnnnnnnnnnnnnnnnnnnnnnnnnnnnnnnnnnnnnnnnnnnnnnnnnnnnnnnnnnnnnnnnnnnnnnnnnnnnnnnnnnnnnnnnnnnnnnnnnnnnnnnnnnnnnnnnnnnnnnnnnnnnnnnnnnnnnnnnnnnnnnnnnnnnnnnnnnnnnnnnnnnnnnnnnnnnnnnnnnnnnnnnnnnnnnnnnnnnnnnnnnnnnnnnnnnnnnnnnnnnnnnnnnnnnnnnnnnnnnnnnnnnnnnnnnnnnnnnnnnnnnnnnnnnnnnnnnnnnnnnnnnnnnnnnnnnnnnnnnnnnnnnnnnnnnnnnnnnnnnnnnnnnnnnnnnnnnnnnnnnnnnnnnnnnnnnnnnnnnnnnnnnnnnnnnnnnnnnnnnnnnnnnnnnnnnnnnnnnnnnnnnnnnnnnnnnnnnnnnnnnnnnnnnnnnnnnnnnnnnnnnnnnnnnnnnnnnnnnnnnnnnnnnnnnnnnnnnnnnnnnnnnnnnnnnnnnnnnnnnnnnnnnnnnnnnnnnnnnnnnnnnnnnnnnnnnnnnnnnnnnnnnnnnnnnnnnnnnnnnnnnnnnnnnnnnnnnnnnnnnnnnnnnnnnnnnnnnnnnnnnnnnnnnnnnnnnnnnnnnnnnnnnnnnnnnnnnnnnnnnnnnnnnnnnnnnnnnnnnnnnnnnnnnnnnnnnnnnnnnnnnnnnnnnnnnnnnnnnnnnnnnnnnnnnnnnnnnnnnnnnnnnnnnnnnnnnnnnnnnnnnnnnnnnnnnnnnnnnnnnnnnnnnnnnnnnnnnnnnnnnnnnnnnnnnnnnnnnnnnnnnnnnnnnnnnnnnnnnnnnnnnnnnnnnnnnnnnnnnnnnnnnnnnnnnnnnnnnnnnnnnnnnnnnnnnnnnnnnnnnnnnnnnnnnnnnnnnnnnnnnnnnnnnnnnnnnnnnnnnnnnnnnnnnnnnnnnnnnnnnnnnnnnnnnnnnnnnnnnnnnnnnnnnnnnnnnnnnnnnnnnnnnnnnnnnnnnnnnnnnnnnnnnnnnnnnnnnnnnnnnnnnnnnnnnnnnnnnnnnnnnnnnnnnnnnnnnnnnnnnnnnnnnnnnnnnnnnnnnnnnnnnnnnnnnnnnnnnnnnnnnnnnnnnnnnnnnnnnnnnnnnnnnnnnnnnnnnnnnnnnnnnnnnnnnnnnnnnnnnnnnnnnnnnnnnnnnnnnnnnnnnnnnnnnnnnnnnnnnnnnnnnnnnnnnnnnnnnnnnnnnnnnnnnnnnnnnnnnnnnnnnnnnnnnnnnnnnnnnnnnnnnnnnnnnnnnnnnnnnnnnnnnnnnnnnnnnnnnnnnnnnnnnnnnnnnnnnnnnnnnnnnnnnnnnnnnnnnnnnnnnnnnnnnnnnnnnnnnnnnnnnnnnnnnnnnnnnnnnnnnnnnnnnnnnnnnnnnnnnnnnnnnnnnnnnnnnnnnnnnnnnnnnnnnnnnnnnnnnnnnnnnnnnnnnnnnnnnnnnnnnnnnnnnnnnnnnnnnnnnnnnnnnnnnnnnnnnnnnnnnnnnnnnnnnnnnnnnnnnnnnnnnnnnnnnnnnnnnnnnnnnnnnnnnnnnnnnnnnnnnnnnnnnnnnnnnnnnnnnnnnnnnnnnnnnnnnnnnnnnnnnnnnnnnnnnnnnnnnnnnnnnnnnnnnnnnnnnnnnnnnnnnnnnnnnnnnnnnnnnnnnnnnnnnnnnnnnnnnnnnnnnnnnnnnnnnnnnnnnnnnnnnnnnnnnnnnnnnnnnnnnnnnnnnnnnnnnnnnnnnnnnnnnnnnnnnnnnnnnnnnnnnnnnnnnnnnnnnnnnnnnnnnnnnnnnnnnnnnnnnnnnnnnnnnnnnnnnnnnnnnnnnnnnnnnnnnnnnnnnnnnnnnnnnnnnnnnnnnnnnnnnnnnnnnnnnnnnnnnnnnnnnnnnnnnnnnnnnnnnnnnnnnnnnnnnnnnnnnnnnnnnnnnnnnnnnnnnnnnnnnnnnnnnnnnnnnnnnnnnnnnnnnnnnnnnnnnnnnnnnnnnnnnnnnnnnnnnnnnnnnnnnnnnnnnnnnnnnnnnnnnnnnnnnnnnnnnnnnnnnnnnnnnnnnnnnnnnnnnnnnnnnnnnnnnnnnnnnnnnnnnnnnnnnnnnnnnnnnnnnnnnnnnnnnnnnnnnnnnnnnnnnnnnnnnnnnnnnnnnnnnnnnnnnnnnnnnnnnnnnnnnnnnnnnnnnnnnnnnnnnnnnnnnnnnnnnnnnnnnnnnnnnnnnnnnnnnnnnnnnnnnnnnnnnnnnnnnnnnnnnnnnnnnnnnnnnnnnnnnnnnnnnnnnnnnnnnnnnnnnnnnnnnnnnnnnnnnnnnnnnnnnnnnnnnnnnnnnnnnnnnnnnnnnnnnnnnnnnnnnnnnnnnnnnnnnnnnnnnnnnnnnnnnnnnnnnnnnnnnnnnnnnnnnnnnnnnnnnnnnnnnnnnnnnnnnnnnnnnnnnnnnnnnnnnnnnnnnnnnnnnnnnnnnnnnnnnnnnnnnnnnnnnnnnnnnnnnnnnnnnnnnnnnnnnnnnnnnnnnnnnnnnnnnnnnnnnnnnnnnnnnnnnnnnnnnnnnnnnnnnnnnnnnnnnnnnnnnnnnnnnnnnnnnnnnnnnnnnnnnnnnnnnnnnnnnnnnnnnnnnnnnnnnnnnnnnnnnnnnnnnnnnnnnnnnnnnnnnnnnnnnnnnnnnnnnnnnnnnnnnnnnnnnnnnnnnnnnnnnnnnnnnnnnnnnnnnnnnnnnnnnnnnnnnnnnnnnnnnnnnnnnnnnnnnnnnnnnnnnnnnnnnnnnnnnnnnnnnnnnnnnnnnnnnnnnnnnnnnnnnnnnnnnnnnnnnnnnnnnnnnnnnnnnnnnnnnnnnnnnnnnnnnnnnnnnnnnnnnnnnnnnnnnnnnnnnnnnnnnnnnnnnnnnnnnnnnnnnnnnnnnnnnnnnnnnnnnnnnnnnnnnnnnnnnnnnnnnnnnnnnnnnnnnnnnnnnnnnnnnnnnnnnnnnnnnnnnnnnnnnnnnnnnnnnnnnnnnnnnnnnnnnnnnnnnnnnnnnnnnnnnnnnnnnnnnnnnnnnnnnnnnnnnnnnnnnnnnnnnnnnnnnnnnnnnnnnnnnnnnnnnnnnnnnnnnnnnnnnnnnnnnnnnnnnnnnnnnnnnnnnnnnnnnnnnnnnnnnnnnnnnnnnnnnnnnnnnnnnnnnnnnnnnnnnnnnnnnnnnnnnnnnnnnnnnnnnnnnnnnnnnnnnnnnnnnnnnnnnnnnnnnnnnnnnnnnnnnnnnnnnnnnnnnnnnnnnnnnnnnnnnnnnnnnnnnnnnnnnnnnnnnnnnnnnnnnnnnnnnnnnnnnnnnnnnnnnnnnnnnnnnnnnnnnnnnnnnnnnnnnnnnnnnnnnnnnnnnnnnnnnnnnnnnnnnnnnnnnnnnnnnnnnnnnnnnnnnnnnnnnnnnnnnnnnnnnnnnnnnnnnnnnnnnnnnnnnnnnnnnnnnnnnnnnnnnnnnnnnnnnnnnnnnnnnnnnnnnnnnnnnnnnnnnnnnnnnnnnnnnnnnnnnnnnnnnnnnnnnnnnnnnnnnnnnnnnnnnnnnnnnnnnnnnnnnnnnnnnnnnnnnnnnnnnnnnnnnnnnnnnnnnnnnnnnnnnnnnnnnnnnnnnnnnnnnnnnnnnnnnnnnnnnnnnnnnnnnnnnnnnnnnnnnnnnnnnnnnnnnnnnnnnnnnnnnnnnnnnnnnnnnnnnnnnnnnnnnnnnnnnnnnnnnnnnnnnnnnnnnnnnnnnnnnnnnnnnnnnnnnnnnnnnnnnnnnnnnnnnnnnnnnnnnnnnnnnnnnnnnnnnnnnnnnnnnnnnnnnnnnnnnnnnnnnnnnnnnnnnnnnnnnnnnnnnnnnnnnnnnnnnnnnnnnnnnnnnnnnnnnnnnnnnnnnnnnnnnnnnnnnnnnnnnnnnnnnnnnnnnnnnnnnnnnnnnnnnnnnnnnnnnnnnnnnnnnnnnnnnnnnnnnnnnnnnnnnnnnnnnnnnnnnnnnnnnnnnnnnnnnnnnnnnnnnnnnnnnnnnnnnnnnnnnnnnnnnnnnnnnnnnnnnnnnnnnnnnnnnnnnnnnnnnnnnnnnnnnnnnnnnnnnnnnnnnnnnnnnnnnnnnnnnnnnnnnnnnnnnnnnnnnnnnnnnnnnnnnnnnnnnnnnnnnnnnnnnnnnnnnnnnnnnnnnnnnnnnnnnnnnnnnnnnnnnnnnnnnnnnnnnnnnnnnnnnnnnnnnnnnnnnnnnnnnnnnnnnnnnnnnnnnnnnnnnnnnnnnnnnnnnnnnnnnnnnnnnnnnnnnnnnnnnnnnnnnnnnnnnnnnnnnnnnnnnnnnnnnnnnnnnnnnnnnnnnnnnnnnnnnnnnnnnnnnnnnnnnnnnnnnnnnnnnnnnnnnnnnnnnnnnnnnnnnnnnnnnnnnnnnnnnnnnnnnnnnnnnnnnnnnnnnnnnnnnnnnnnnnnnnnnnnnnnnnnnnnnnnnnnnnnnnnnnnnnnnnnnnnnnnnnnnnnnnnnnnnnnnnnnnnnnnnnnnnnnnnnnnnnnnnnnnnnnnnnnnnnnnnnnnnnnnnnnnnnnnnnnnnnnnnnnnnnnnnnnnnnnnnnnnnnnnnnnnnnnnnnnnnnnnnnnnnnnnnnnnnnnnnnnnnnnnnnnnnnnnnnnnnnnnnnnnnnnnnnnnnnnnnnnnnnnnnnnnnnnnnnnnnnnnnnnnnnnnnnnnnnnnnnnnnnnnnnnnnnnnnnnnnnnnnnnnnnnnnnnnnnnnnnnnnnnnnnnnnnnnnnnnnnnnnnnnnnnnnnnnnnnnnnnnnnnnnnnnnnnnnnnnnnnnnnnnnnnnnnnnnnnnnnnnnnnnnnnnnnnnnnnnnnnnnnnnnnnnnnnnnnnnnnnnnnnnnnnnnnnnnnnnnnnnnnnnnnnnnnnnnnnnnnnnnnnnnnnnnnnnnnnnnnnnnnnnnnnnnnnnnnnnnnnnnnnnnnnnnnnnnnnnnnnnnnnnnnnnnnnnnnnnnnnnnnnnnnnnnnnnnnnnnnnnnnnnnnnnnnnnnnnnnnnnnnnnnnnnnnnnnnnnnnnnnnnnnnnnnnnnnnnnnnnnnnnnnnnnnnnnnnnnnnnnnnnnnnnnnnnnnnnnnnnnnnnnnnnnnnnnnnnnnnnnnnnnnnnnnnnnnnnnnnnnnnnnnnnnnnnnnnnnnnnnnnnnnnnnnnnnnnnnnnnnnnnnnnnnnnnnnnnnnnnnnnnnnnnnnnnnnnnnnnnnnnnnnnnnnnnnnnnnnnnnnnnnnnnnnnnnnnnnnnnnnnnnnnnnnnnnnnnnnnnnnnnnnnnnnnnnnnnnnnnnnnnnnnnnnnnnnnnnnnnnnnnnnnnnnnnnnnnnnnnnnnnnnnnnnnnnnnnnnnnnnnnnnnnnnnnnnnnnnnnnnnnnnnnnnnnnnnnnnnnnnnnnnnnnnnnnnnnnnnnnnnnnnnnnnnnnnnnnnnnnnnnnnnnnnnnnnnnnnnnnnnnnnnnnnnnnnnnnnnnnnnnnnnnnnnnnnnnnnnnnnnnnnnnnnnnnnnnnnnnnnnnnnnnnnnnnnnnnnnnnnnnnnnnnnnnnnnnnnnnnnnnnnnnnnnnnnnnnnnnnnnnnnnnnnnnnnnnnnnnnnnnnnnnnnnnnnnnnnnnnnnnnnnnnnnnnnnnnnnnnnnnnnnnnnnnnnnnnnnnnnnnnnnnnnnnnnnnnnnnnnnnnnnnnnnnnnnnnnnnnnnnnnnnnnnnnnnnnnnnnnnnnnnnnnnnnnnnnnnnnnnnnnnnnnnnnnnnnnnnnnnnnnnnnnnnnnnnnnnnnnnnnnnnnnnnnnnnnnnnnnnnnnnnnnnnnnnnnnnnnnnnnnnnnnnnnnnnnnnnnnnnnnnnnnnnnnnnnnnnnnnnnnnnnnnnnnnnnnnnnnnnnnnnnnnnnnnnnnnnnnnnnnnnnnnnnnnnnnnnnnnnnnnnnnnnnnnnnnnnnnnnnnnnnnnnnnnnnnnnnnnnnnnnnnnnnnnnnnnnnnnnnnnnnnnnnnnnnnnnnnnnnnnnnnnnnnnnnnnnnnnnnnnnnnnnnnnnnnnnnnnnnnnnnnnnnnnnnnnnnnnnnnnnnnnnnnnnnnnnnnnnnnnnnnnnnnnnnnnnnnnnnnnnnnnnnnnnnnnnnnnnnnnnnnnnnnnnnnnnnnnnnnnnnnnnnnnnnnnnnnnnnnnnnnnnnnnnnnnnnnnnnnnnnnnnnnnnnnnnnnnnnnnnnnnnnnnnnnnnnnnnnnnnnnnnnnnnnnnnnnnnnnnnnnnnnnnnnnnnnnnnnnnnnnnnnnnnnnnnnnnnnnnnnnnnnnnnnnnnnnnnnnnnnnnnnnnnnnnnnnnnnnnnnnnnnnnnnnnnnnnnnnnnnnnnnnnnnnnnnnnnnnnnnnnnnnnnnnnnnnnnnnnnnnnnnnnnnnnnnnnnnnnnnnnnnnnnnnnnnnnnnnnnnnnnnnnnnnnnnnnnnnnnnnnnnnnnnnnnnnnnnnnnnnnnnnnnnnnnnnnnnnnnnnnnnnnnnnnnnnnnnnnnnnnnnnnnnnnnnnnnnnnnnnnnnnnnnnnnnnnnnnnnnnnnnnnnnnnnnnnnnnnnnnnnnnnnnnnnnnnnnnnnnnnnnnnnnnnnnnnnnnnnnnnnnnnnnnnnnnnnnnnnnnnnnnnnnnnnnnnnnnnnnnnnnnnnnnnnnnnnnnnnnnnnnnnnnnnnnnnnnnnnnnnnnnnnnnnnnnnnnnnnnnnnnnnnnnnnnnnnnnnnnnnnnnnnnnnnnnnnnnnnnnnnnnnnnnnnnnnnnnnnnnnnnnnnnnnnnnnnnnnnnnnnnnnnnnnnnnnnnnnnnnnnnnnnnnnnnnnnnnnnnnnnnnnnnnnnnnnnnnnnnnnnnnnnnnnnnnnnnnnnnnnnnnnnnnnnnnnnnnnnnnnnnnnnnnnnnnnnnnnnnnnnnnnnnnnnnnnnnnnnnnnnnnnnnnnnnnnnnnnnnnnnnnnnnnnnnnnnnnnnnnnnnnnnnnnnnnnnnnnnnnnnnnnnnnnnnnnnnnnnnnnnnnnnnnnnnnnnnnnnnnnnnnnnnnnnnnnnnnnnnnnnnnnnnnnnnnnnnnnnnnnnnnnnnnnnnnnnnnnnnnnnnnnnnnnnnnnnnnnnnnnnnnnnnnnnnnnnnnnnnnnnnnnnnnnnnnnnnnnnnnnnnnnnnnnnnnnnnnnnnnnnnnnnnnnnnnnnnnnnnnnnnnnnnnnnnnnnnnnnnnnnnnnnnnnnnnnnnnnnnnnnnnnnnnnnnnnnnnnnnnnnnnnnnnnnnnnnnnnnnnnnnnnnnnnnnnnnnnnnnnnnnnnnnnnnnnnnnnnnnnnnnnnnnnnnnnnnnnnnnnnnnnnnnnnnnnnnnnnnnnnnnnnnnnnnnnnnnnnnnnnnnnnnnnnnnnnnnnnnnnnnnnnnnnnnnnnnnnnnnnnnnnnnnnnnnnnnnnnnnnnnnnnnnnnnnnnnnnnnnnnnnnnnnnnnnnnnnnnnnnnnnnnnnnnnnnnnnnnnnnnnnnnnnnnnnnnnnnnnnnnnnnnnnnnnnnnnnnnnnnnnnnnnnnnnnnnnnnnnnnnnnnnnnnnnnnnnnnnnnnnnnnnnnnnnnnnnnnnnnnnnnnnnnnnnnnnnnnnnnnnnnnnnnnnnnnnnnnnnnnnnnnnnnnnnnnnnnnnnnnnnnnnnnnnnnnnnnnnnnnnnnnnnnnnnnnnnnnnnnnnnnnnnnnnnnnnnnnnnnnnnnnnnnnnnnnnnnnnnnnnnnnnnnnnnnnnnnnnnnnnnnnnnnnnnnnnnnnnnnnnnnnnnnnnnnnnnnnnnnnnnnnnnnnnnnnnnnnnnnnnnnnnnnnnnnnnnnnnnnnnnnnnnnnnnnnnnnnnnnnnnnnnnnnnnnnnnnnnnnnnnnnnnnnnnnnnnnnnnnnnnnnnnnnnnnnnnnnnnnnnnnnnnnnnnnnnnnnnnnnnnnnnnnnnnnnnnnnnnnnnnnnnnnnnnnnnnnnnnnnnnnnnnnnnnnnnnnnnnnnnnnnnnnnnnnnnnnnnnnnnnnnnnnnnnnnnnnnnnnnnnnnnnnnnnnnnnnnnnnnnnnnnnnnnnnnnnnnnnnnnnnnnnnnnnnnnnnnnnnnnnnnnnnnnnnnnnnnnnnnnnnnnnnnnnnnnnnnnnnnnnnnnnnnnnnnnnnnnnnnnnnnnnnnnnnnnnnnnnnnnnnnnnnnnnnnnnnnnnnnnnnnnnnnnnnnnnnnnnnnnnnnnnnnnnnnnnnnnnnnnnnnnnnnnnnnnnnnnnnnnnnnnnnnnnnnnnnnnnnnnnnnnnnnnnnnnnnnnnnnnnnnnnnnnnnnnnnnnnnnnnnnnnnnnnnnnnnnnnnnnnnnnnnnnnnnnnnnnnnnnnnnnnnnnnnnnnnnnnnnnnnnnnnnnnnnnnnnnnnnnnnnnnnnnnnnnnnnnnnnnnnnnnnnnnnnnnnnnnnnnnnnnnnnnnnnnnnnnnnnnnnnnnnnnnnnnnnnnnnnnnnnnnnnnnnnnnnnnnnnnnnnnnnnnnnnnnnnnnnnnnnnnnnnnnnnnnnnnnnnnnnnnnnnnnnnnnnnnnnnnnnnnnnnnnnnnnnnnnnnnnnnnnnnnnnnnnnnnnnnnnnnnnnnnnnnnnnnnnnnnnnnnnnnnnnnnnnnnnnnnnnnnnnnnnnnnnnnnnnnnnnnnnnnnnnnnnnnnnnnnnnnnnnnnnnnnnnnnnnnnnnnnnnnnnnnnnnnnnnnnnnnnnnnnnnnnnnnnnnnnnnnnnnnnnnnnnnnnnnnnnnnnnnnnnnnnnnnnnnnnnnnnnnnnnnnnnnnnnnnnnnnnnnnnnnnnnnnnnnnnnnnnnnnnnnnnnnnnnnnnnnnnnnnnnnnnnnnnnnnnnnnnnnnnnnnnnnnnnnnnnnnnnnnnnnnnnnnnnnnnnnnnnnnnnnnnnnnnnnnnnnnnnnnnnnnnnnnnnnnnnnnnnnnnnnnnnnnnnnnnnnnnnnnnnnnnnnnnnnnnnnnnnnnnnnnnnnnnnnnnnnnnnnnnnnnnnnnnnnnnnnnnnnnnnnnnnnnnnnnnnnnnnnnnnnnnnnnnnnnnnnnnnnnnnnnnnnnnnnnnnnnnnnnnnnnnnnnnnnnnnnnnnnnnnnnnnnnnnnnnnnnnnnnnnnnnnnnnnnnnnnnnnnnnnnnnnnnnnnnnnnnnnnnnnnnnnnnnnnnnnnnnnnnnnnnnnnnnnnnnnnnnnnnnnnnnnnnnnnnnnnnnnnnnnnnnnnnnnnnnnnnnnnnnnnnnnnnnnnnnnnnnnnnnnnnnnnnnnnnnnnnnnnnnnnnnnnnnnnnnnnnnnnnnnnnnnnnnnnnnnnnnnnnnnnnnnnnnnnnnnnnnnnnnnnnnnnnnnnnnnnnnnnnnnnnnnnnnnnnnnnnnnnnnnnnnnnnnnnnnnnnnnnnnnnnnnnnnnnnnnnnnnnnnnnnnnnnnnnnnnnnnnnnnnnnnnnnnnnnnnnnnnnnnnnnnnnnnnnnnnnnnnnnnnnnnnnnnnnnnnnnnnnnnnnnnnnnnnnnnnnnnnnnnnnnnnnnnnnnnnnnnnnnnnnnnnnnnnnnnnnnnnnnnnnnnnnnnnnnnnnnnnnnnnnnnnnnnnnnnnnnnnnnnnnnnnnnnnnnnnnnnnnnnnnnnnnnnnnnnnnnnnnnnnnnnnnnnnnnnnnnnnnnnnnnnnnnnnnnnnnnnnnnnnnnnnnnnnnnnnnnnnnnnnnnnnnnnnnnnnnnnnnnnnnnnnnnnnnnnnnnnnnnnnnnnnnnnnnnnnnnnnnnnnnnnnnnnnnnnnnnnnnnnnnnnnnnnnnnnnnnnnnnnnnnnnnnnnnnnnnnnnnnnnnnnnnnnnnnnnnnnnnnnnnnnnnnnnnnnnnnnnnnnnnnnnnnnnnnnnnnnnnnnnnnnnnnnnnnnnnnnnnnnnnnnnnnnnnnnnnnnnnnnnnnnnnnnnnnnnnnnnnnnnnnnnnnnnnnnnnnnnnnnnnnnnnnnnnnnnnnnnnnnnnnnnnnnnnnnnnnnnnnnnnnnnnnnnnnnnnnnnnnnnnnnnnnnnnnnnnnnnnnnnnnnnnnnnnnnnnnnnnnnnnnnnnnnnnnnnnnnnnnnnnnnnnnnnnnnnnnnnnnnnnnnnnnnnnnnnnnnnnnnnnnnnnnnnnnnnnnnnnnnnnnnnnnnnnnnnnnnnnnnnnnnnnnnnnnnnnnnnnnnnnnnnnnnnnnnnnnnnnnnnnnnnnnnnnnnnnnnnnnnnnnnnnnnnnnnnnnnnnnnnnnnnnnnnnnnnnnnnnnnnnnnnnnnnnnnnnnnnnnnnnnnnnnnnnnnnnnnnnnnnnnnnnnnnnnnnnnnnnnnnnnnnnnnnnnnnnnnnnnnnnnnnnnnnnnnnnnnnnnnnnnnnnnnnnnnnnnnnnnnnnnnnnnnnnnnnnnnnnnnnnnnnnnnnnnnnnnnnnnnnnnnnnnnnnnnnnnnnnnnnnnnnnnnnnnnnnnnnnnnnnnnnnnnnnnnnnnnnnnnnnnnnnnnnnnnnnnnnnnnnnnnnnnnnnnnnnnnnnnnnnnnnnnnnnnnnnnnnnnnnnnnnnnnnnnnnnnnnnnnnnnnnnnnnnnnnnnnnnnnnnnnnnnnnnnnnnnnnnnnnnnnnnnnnnnnnnnnnnnnnnnnnnnnnnnnnnnnnnnnnnnnnnnnnnnnnnnnnnnnnnnnnnnnnnnnnnnnnnnnnnnnnnnnnnnnnnnnnnnnnnnnnnnnnnnnnnnnnnnnnnnnnnnnnnnnnnnnnnnnnnnnnnnnnnnnnnnnnnnnnnnnnnnnnnnnnnnnnnnnnnnnnnnnnnnnnnnnnnnnnnnnnnnnnnnnnnnnnnnnnnnnnnnnnnnnnnnnnnnnnnnnnnnnnnnnnnnnnnnnnnnnnnnnnnnnnnnnnnnnnnnnnnnnnnnnnnnnnnnnnnnnnnnnnnnnnnnnnnnnnnnnnnnnnnnnnnnnnnnnnnnnnnnnnnnnnnnnnnnnnnnnnnnnnnnnnnnnnnnnnnnnnnnnnnnnnnnnnnnnnnnnnnnnnnnnnnnnnnnnnnnnnnnnnnnnnnnnnnnnnnnnnnnnnnnnnnnnnnnnnnnnnnnnnnnnnnnnnnnnnnnnnnnnnnnnnnnnnnnnnnnnnnnnnnnnnnnnnnnnnnnnnnnnnnnnnnnnnnnnnnnnnnnnnnnnnnnnnnnnnnnnnnnnnnnnnnnnnnnnnnnnnnnnnnnnnnnnnnnnnnnnnnnnnnnnnnnnnnnnnnnnnnnnnnnnnnnnnnnnnnnnnnnnnnnnnnnnnnnnnnnnnnnnnnnnnnnnnnnnnnnnnnnnnnnnnnnnnnnnnnnnnnnnnnnnnnnnnnnnnnnnnnnnnnnnnnnnnnnnnnnnnnnnnnnnnnnnnnnnnnnnnnnnnnnnnnnnnnnnnnnnnnnnnnnnnnnnnnnnnnnnnnnnnnnnnnnnnnnnnnnnnnnnnnnnnnnnnnnnnnnnnnnnnnnnnnnnnnnnnnnnnnnnnnnnnnnnnnnnnnnnnnnnnnnnnnnnnnnnnnnnnnnnnnnnnnnnnnnnnnnnnnnnnnnnnnnnnnnnnnnnnnnnnnnnnnnnnnnnnnnnnnnnnnnnnnnnnnnnnnnnnnnnnnnnnnnnnnnnnnnnnnnnnnnnnnnnnnnnnnnnnnnnnnnnnnnnnnnnnnnnnnnnnnnnnnnnnnnnnnnnnnnnnnnnnnnnnnnnnnnnnnnnnnnnnnnnnnnnnnnnnnnnnnnnnnnnnnnnnnnnnnnnnnnnnnnnnnnnnnnnnnnnnnnnnnnnnnnnnnnnnnnnnnnnnnnnnnnnnnnnnnnnnnnnnnnnnnnnnnnnnnnnnnnnnnnnnnnnnnnnnnnnnnnnnnnnnnnnnnnnnnnnnnnnnnnnnnnnnnnnnnnnnnnnnnnnnnnnnnnnnnnnnnnnnnnnnnnnnnnnnnnnnnnnnnnnnnnnnnnnnnnnnnnnnnnnnnnnnnnnnnnnnnnnnnnnnnnnnnnnnnnnnnnnnnnnnnnnnnnnnnnnnnnnnnnnnnnnnnnnnnnnnnnnnnnnnnnnnnnnnnnnnnnnnnnnnnnnnnnnnnnnnnnnnnnnnnnnnnnnnnnnnnnnnnnnnnnnnnnnnnnnnnnnnnnnnnnnnnnnnnnnnnnnnnnnnnnnnnnnnnnnnnnnnnnnnnnnnnnnnnnnnnnnnnnnnnnnnnnnnnnnnnnnnnnnnnnnnnnnnnnnnnnnnnnnnnnnnnnnnnnnnnnnnnnnnnnnnnnnnnnnnnnnnnnnnnnnnnnnnnnnnnnnnnnnnnnnnnnnnnnnnnnnnnnnnnnnnnnnnnnnnnnnnnnnnnnnnnnnnnnnnnnnnnnnnnnnnnnnnnnnnnnnnnnnnnnnnnnnnnnnnnnnnnnnnnnnnnnnnnnnnnnnnnnnnnnnnnnnnnnnnnnnnnnnnnnnnnnnnnnnnnnnnnnnnnnnnnnnnnnnnnnnnnnnnnnnnnnnnnnnnnnnnnnnnnnnnnnnnnnnnnnnnnnnnnnnnnnnnnnnnnnnnnnnnnnnnnnnnnnnnnnnnnnnnnnnnnnnnnnnnnnnnnnnnnnnnnnnnnnnnnnnnnnnnnnnnnnnnnnnnnnnnnnnnnnnnnnnnnnnnnnnnnnnnnnnnnnnnnnnnnnnnnnnnnnnnnnnnnnnnnnnnnnnnnnnnnnnnnnnnnnnnnnnnnnnnnnnnnnnnnnnnnnnnnnnnnnnnnnnnnnnnnnnnnnnnnnnnnnnnnnnnnnnnnnnnnnnnnnnnnnnnnnnnnnnnnnnnnnnnnnnnnnnnnnnnnnnnnnnnnnnnnnnnnnnnnnnnnnnnnnnnnnnnnnnnnnnnnnnnnnnnnnnnnnnnnnnnnnnnnnnnnnnnnnnnnnnnnnnnnnnnnnnnnnnnnnnnnnnnnnnnnnnnnnnnnnnnnnnnnnnnnnnnnnnnnnnnnnnnnnnnnnnnnnnnnnnnnnnnnnnnnnnnnnnnnnnnnnnnnnnnnnnnnnnnnnnnnnnnnnnnnnnnnnnnnnnnnnnnnnnnnnnnnnnnnnnnnnnnnnnnnnnnnnnnnnnnnnnnnnnnnnnnnnnnnnnnnnnnnnnnnnnnnnnnnnnnnnnnnnnnnnnnnnnnnnnnnnnnnnnnnnnnnnnnnnnnnnnnnnnnnnnnnnnnnnnnnnnnnnnnnnnnnnnnnnnnnnnnnnnnnnnnnnnnnnnnnnnnnnnnnnnnnnnnnnnnnnnnnnnnnnnnnnnnnnnnnnnnnnnnnnnnnnnnnnnnnnnnnnnnnnnnnnnnnnnnnnnnnnnnnnnnnnnnnnnnnnnnnnnnnnnnnnnnnnnnnnnnnnnnnnnnnnnnnnnnnnnnnnnnnnnnnnnnnnnnnnnnnnnnnnnnnnnnnnnnnnnnnnnnnnnnnnnnnnnnnnnnnnnnnnnnnnnnnnnnnnnnnnnnnnnnnnnnnnnnnnnnnnnnnnnnnnnnnnnnnnnnnnnnnnnnnnnnnnnnnnnnnnnnnnnnnnnnnnnnnnnnnnnnnnnnnnnnnnnnnnnnnnnnnnnnnnnnnnnnnnnnnnnnnnnnnnnnnnnnnnnnnnnnnnnnnnnnnnnnnnnnnnnnnnnnnnnnnnnnnnnnnnnnnnnnnnnnnnnnnnnnnnnnnnnnnnnnnnnnnnnnnnnnnnnnnnnnnnnnnnnnnnnnnnnnnnnnnnnnnnnnnnnnnnnnnnnnnnnnnnnnnnnnnnnnnnnnnnnnnnnnnnnnnnnnnnnnnnnnnnnnnnnnnnnnnnnnnnnnnnnnnnnnnnnnnnnnnnnnnnnnnnnnnnnnnnnnnnnnnnnnnnnnnnnnnnnnnnnnnnnnnnnnnnnnnnnnnnnnnnnnnnnnnnnnnnnnnnnnnnnnnnnnnnnnnnnnnnnnnnnnnnnnnnnnnnnnnnnnnnnnnnnnnnnnnnnnnnnnnnnnnnnnnnnnnnnnnnnnnnnnnnnnnnnnnnnnnnnnnnnnnnnnnnnnnnnnnnnnnnnnnnnnnnnnnnnnnnnnnnnnnnnnnnnnnnnnnnnnnnnnnnnnnnnnnnnnnnnnnnnnnnnnnnnnnnnnnnnnnnnnnnnnnnnnnnnnnnnnnnnnnnnnnnnnnnnnnnnnnnnnnnnnnnnnnnnnnnnnnnnnnnnnnnnnnnnnnnnnnnnnnnnnnnnnnnnnnnnnnnnnnnnnnnnnnnnnnnnnnnnnnnnnnnnnnnnnnnnnnnnnnnnnnnnnnnnnnnnnnnnnnnnnnnnnnnnnnnnnnnnnnnnnnnnnnnnnnnnnnnnnnnnnnnnnnnnnnnnnnnnnnnnnnnnnnnnnnnnnnnnnnnnnnnnnnnnnnnnnnnnnnnnnnnnnnnnnnnnnnnnnnnnnnnnnnnnnnnnnnnnnnnnnnnnnnnnnnnnnnnnnnnnnnnnnnnnnnnnnnnnnnnnnnnnnnnnnnnnnnnnnnnnnnnnnnnnnnnnnnnnnnnnnnnnnnnnnnnnnnnnnnnnnnnnnnnnnnnnnnnnnnnnnnnnnnnnnnnnnnnnnnnnnnnnnnnnnnnnnnnnnnnnnnnnnnnnnnnnnnnnnnnnnnnnnnnnnnnnnnnnnnnnnnnnnnnnnnnnnnnnnnnnnnnnnnnnnnnnnnnnnnnnnnnnnnnnnnnnnnnnnnnnnnnnnnnnnnnnnnnnnnnnnnnnnnnnnnnnnnnnnnnnnnnnnnnnnnnnnnnnnnnnnnnnnnnnnnnnnnnnnnnnnnnnnnnnnnnnnnnnnnnnnnnnnnnnnnnnnnnnnnnnnnnnnnnnnnnnnnnnnnnnnnnnnnnnnnnnnnnnnnnnnnnnnnnnnnnnnnnnnnnnnnnnnnnnnnnnnnnnnnnnnnnnnnnnnnnnnnnnnnnnnnnnnnnnnnnnnnnnnnnnnnnnnnnnnnnnnnnnnnnnnnnnnnnnnnnnnnnnnnnnnnnnnnnnnnnnnnnnnnnnnnnnnnnnnnnnnnnnnnnnnnnnnnnnnnnnnnnnnnnnnnnnnnnnnnnnnnnnnnnnnnnnnnnnnnnnnnnnnnnnnnnnnnnnnnnnnnnnnnnnnnnnnnnnnnnnnnnnnnnnnnnnnnnnnnnnnnnnnnnnnnnnnnnnnnnnnnnnnnnnnnnnnnnnnnnnnnnnnnnnnnnnnnnnnnnnnnnnnnnnnnnnnnnnnnnnnnnnnnnnnnnnnnnnnnnnnnnnnnnnnnnnnnnnnnnnnnnnnnnnnnnnnnnnnnnnnnnnnnnnnnnnnnnnnnnnnnnnnnnnnnnnnnnnnnnnnnnnnnnnnnnnnnnnnnnnnnnnnnnnnnnnnnnnnnnnnnnnnnnnnnnnnnnnnnnnnnnnnnnnnnnnnnnnnnnnnnnnnnnnnnnnnnnnnnnnnnnnnnnnnnnnnnnnnnnnnnnnnnnnnnnnnnnnnnnnnnnnnnnnnnnnnnnnnnnnnnnnnnnnnnnnnnnnnnnnnnnnnnnnnnnnnnnnnnnnnnnnnnnnnnnnnnnnnnnnnnnnnnnnnnnnnnnnnnnnnnnnnnnnnnnnnnnnnnnnnnnnnnnnnnnnnnnnnnnnnnnnnnnnnnnnnnnnnnnnnnnnnnnnnnnnnnnnnnnnnnnnnnnnnnnnnnnnnnnnnnnnnnnnnnnnnnnnnnnnnnnnnnnnnnnnnnnnnnnnnnnnnnnnnnnnnnnnnnnnnnnnnnnnnnnnnnnnnnnnnnnnnnnnnnnnnnnnnnnnnnnnnnnnnnnnnnnnnnnnnnnnnnnnnnnnnnnnnnnnnnnnnnnnnnnnnnnnnnnnnnnnnnnnnnnnnnnnnnnnnnnnnnnnnnnnnnnnnnnnnnnnnnnnnnnnnnnnnnnnnnnnnnnnnnnnnnnnnnnnnnnnnnnnnnnnnnnnnnnnnnnnnnnnnnnnnnnnnnnnnnnnnnnnnnnnnnnnnnnnnnnnnnnnnnnnnnnnnnnnnnnnnnnnnnnnnnnnnnnnnnnnnnnnnnnnnnnnnnnnnnnnnnnnnnnnnnnnnnnnnnnnnnnnnnnnnnnnnnnnnnnnnnnnnnnnnnnnnnnnnnnnnnnnnnnnnnnnnnnnnnnnnnnnnnnnnnnnnnnnnnnnnnnnnnnnnnnnnnnnnnnnnnnnnnnnnnnnnnnnnnnnnnnnnnnnnnnnnnnnnnnnnnnnnnnnnnnnnnnnnnnnnnnnnnnnnnnnnnnnnnnnnnnnnnnnnnnnnnnnnnnnnnnnnnnnnnnnnnnnnnnnnnnnnnnnnnnnnnnnnnnnnnnnnnnnnnnnnnnnnnnnnnnnnnnnnnnnnnnnnnnnnnnnnnnnnnnnnnnnnnnnnnnnnnnnnnnnnnnnnnnnnnnnnnnnnnnnnnnnnnnnnnnnnnnnnnnnnnnnnnnnnnnnnnnnnnnnnnnnnnnnnnnnnnnnnnnnnnnnnnnnnnnnnnnnnnnnnnnnnnnnnnnnnnnnnnnnnnnnnnnnnnnnnnnnnnnnnnnnnnnnnnnnnnnnnnnnnnnnnnnnnnnnnnnnnnnnnnnnnnnnnnnnnnnnnnnnnnnnnnnnnnnnnnnnnnnnnnnnnnnnnnnnnnnnnnnnnnnnnnnnnnnnnnnnnnnnnnnnnnnnnnnnnnnnnnnnnnnnnnnnnnnnnnnnnnnnnnnnnnnnnnnnnnnnnnnnnnnnnnnnnnnnnnnnnnnnnnnnnnnnnnnnnnnnnnnnnnnnnnnnnnnnnnnnnnnnnnnnnnnnnnnnnnnnnnnnnnnnnnnnnnnnnnnnnnnnnnnnnnnnnnnnnnnnnnnnnnnnnnnnnnnnnnnnnnnnnnnnnnnnnnnnnnnnnnnnnnnnnnnnnnnnnnnnnnnnnnnnnnnnnnnnnnnnnnnnnnnnnnnnnnnnnnnnnnnnnnnnnnnnnnnnnnnnnnnnnnnnnnnnnnnnnnnnnnnnnnnnnnnnnnnnnnnnnnnnnnnnnnnnnnnnnnnnnnnnnnnnnnnnnnnnnnnnnnnnnnnnnnnnnnnnnnnnnnnnnnnnnnnnnnnnnnnnnnnnnnnnnnnnnnnnnnnnnnnnnnnnnnnnnnnnnnnnnnnnnnnnnnnnnnnnnnnnnnnnnnnnnnnnnnnnnnnnnnnnnnnnnnnnnnnnnnnnnnnnnnnnnnnnnnnnnnnnnnnnnnnnnnnnnnnnnnnnnnnnnnnnnnnnnnnnnnnnnnnnnnnnnnnnnnnnnnnnnnnnnnnnnnnnnnnnnnnnnnnnnnnnnnnnnnnnnnnnnnnnnnnnnnnnnnnnnnnnnnnnnnnnnnnnnnnnnnnnnnnnnnnnnnnnnnnnnnnnnnnnnnnnnnnnnnnnnnnnnnnnnnnnnnnnnnnnnnnnnnnnnnnnnnnnnnnnnnnnnnnnnnnnnnnnnnnnnnnnnnnnnnnnnnnnnnnnnnnnnnnnnnnnnnnnnnnnnnnnnnnnnnnnnnnnnnnnnnnnnnnnnnnnnnnnnnnnnnnnnnnnnnnnnnnnnnnnnnnnnnnnnnnnnnnnnnnnnnnnnnnnnnnnnnnnnnnnnnnnnnnnnnnnnnnnnnnnnnnnnnnnnnnnnnnnnnnnnnnnnnnnnnnnnnnnnnnnnnnnnnnnnnnnnnnnnnnnnnnnnnnnnnnnnnnnnnnnnnnnnnnnnnnnnnnnnnnnnnnnnnnnnnnnnnnnnnnnnnnnnnnnnnnnnnnnnnnnnnnnnnnnnnnnnnnnnnnnnnnnnnnnnnnnnnnnnnnnnnnnnnnnnnnnnnnnnnnnnnnnnnnnnnnnnnnnnnnnnnnnnnnnnnnnnnnnnnnnnnnnnnnnnnnnnnnnnnnnnnnnnnnnnnnnnnnnnnnnnnnnnnnnnnnnnnnnnnnnnnnnnnnnnnnnnnnnnnnnnnnnnnnnnnnnnnnnnnnnnnnnnnnnnnnnnnnnnnnnnnnnnnnnnnnnnnnnnnnnnnnnnnnnnnnnnnnnnnnnnnnnnnnnnnnnnnnnnnnnnnnnnnnnnnnnnnnnnnnnnnnnnnnnnnnnnnnnnnnnnnnnnnnnnnnnnnnnnnnnnnnnnnnnnnnnnnnnnnnnnnnnnnnnnnnnnnnnnnnnnnnnnnnnnnnnnnnnnnnnnnnnnnnnnnnnnnnnnnnnnnnnnnnnnnnnnnnnnnnnnnnnnnnnnnnnnnnnnnnnnnnnnnnnnnnnnnnnnnnnnnnnnnnnnnnnnnnnnnnnnnnnnnnnnnnnnnnnnnnnnnnnnnnnnnnnnnnnnnnnnnnnnnnnnnnnnnnnnnnnnnnnnnnnnnnnnnnnnnnnnnnnnnnnnnnnnnnnnnnnnnnnnnnnnnnnnnnnnnnnnnnnnnnnnnnnnnnnnnnnnnnnnnnnnnnnnnnnnnnnnnnnnnnnnnnnnnnnnnnnnnnnnnnnnnnnnnnnnnnnnnnnnnnnnnnnnnnnnnnnnnnnnnnnnnnnnnnnnnnnnnnnnnnnnnnnnnnnnnnnnnnnnnnnnnnnnnnnnnnnnnnnnnnnnnnnnnnnnnnnnnnnnnnnnnnnnnnnnnnnnnnnnnnnnnnnnnnnnnnnnnnnnnnnnnnnnnnnnnnnnnnnnnnnnnnnnnnnnnnnnnnnnnnnnnnnnnnnnnnnnnnnnnnnnnnnnnnnnnnnnnnnnnnnnnnnnnnnnnnnnnnnnnnnnnnnnnnnnnnnnnnnnnnnnnnnnnnnnnnnnnnnnnnnnnnnnnnnnnnnnnnnnnnnnnnnnnnnnnnnnnnnnnnnnnnnnnnnnnnnnnnnnnnnnnnnnnnnnnnnnnnnnnnnnnnnnnnnnnnnnnnnnnnnnnnnnnnnnnnnnnnnnnnnnnnnnnnnnnnnnnnnnnnnnnnnnnnnnnnnnnnnnnnnnnnnnnnnnnnnnnnnnnnnnnnnnnnnnnnnnnnnnnnnnnnnnnnnnnnnnnnnnnnnnnnnnnnnnnnnnnnnnnnnnnnnnnnnnnnnnnnnnnnnnnnnnnnnnnnnnnnnnnnnnnnnnnnnnnnnnnnnnnnnnnnnnnnnnnnnnnnnnnnnnnnnnnnnnnnnnnnnnnnnnnnnnnnnnnnnnnnnnnnnnnnnnnnnnnnnnnnnnnnnnnnnnnnnnnnnnnnnnnnnnnnnnnnnnnnnnnnnnnnnnnnnnnnnnnnnnnnnnnnnnnnnnnnnnnnnnnnnnnnnnnnnnnnnnnnnnnnnnnnnnnnnnnnnnnnnnnnnnnnnnnnnnnnnnnnnnnnnnnnnnnnnnnnnnnnnnnnnnnnnnnnnnnnnnnnnnnnnnnnnnnnnnnnnnnnnnnnnnnnnnnnnnnnnnnnnnnnnnnnnnnnnnnnnnnnnnnnnnnnnnnnnnnnnnnnnnnnnnnnnnnnnnnnnnnnnnnnnnnnnnnnnnnnnnnnnnnnnnnnnnnnnnnnnnnnnnnnnnnnnnnnnnnnnnnnnnnnnnnnnnnnnnnnnnnnnnnnnnnnnnnnnnnnnnnnnnnnnnnnnnnnnnnnnnnnnnnnnnnnnnnnnnnnnnnnnnnnnnnnnnnnnnnnnnnnnnnnnnnnnnnnnnnnnnnnnnnnnnnnnnnnnnnnnnnnnnnnnnnnnnnnnnnnnnnnnnnnnnnnnnnnnnnnnnnnnnnnnnnnnnnnnnnnnnnnnnnnnnnnnnnnnnnnnnnnnnnnnnnnnnnnnnnnnnnnnnnnnnnnnnnnnnnnnnnnnnnnnnnnnnnnnnnnnnnnnnnnnnnnnnnnnnnnnnnnnnnnnnnnnnnnnnnnnnnnnnnnnnnnnnnnnnnnnnnnnnnnnnnnnnnnnnnnnnnnnnnnnnnnnnnnnnnnnnnnnnnnnnnnnnnnnnnnnnnnnnnnnnnnnnnnnnnnnnnnnnnnnnnnnnnnnnnnnnnnnnnnnnnnnnnnnnnnnnnnnnnnnnnnnnnnnnnnnnnnnnnnnnnnnnnnnnnnnnnnnnnnnnnnnnnnnnnnnnnnnnnnnnnnnnnnnnnnnnnnnnnnnnnnnnnnnnnnnnnnnnnnnnnnnnnnnnnnnnnnnnnnnnnnnnnnnnnnnnnnnnnnnnnnnnnnnnnnnnnnnnnnnnnnnnnnnnnnnnnnnnnnnnnnnnnnnnnnnnnnnnnnnnnnnnnnnnnnnnnnnnnnnnnnnnnnnnnnnnnnnnnnnnnnnnnnnnnnnnnnnnnnnnnnnnnnnnnnnnnnnnnnnnnnnnnnnnnnnnnnnnnnnnnnnnnnnnnnnnnnnnnnnnnnnnnnnnnnnnnnnnnnnnnnnnnnnnnnnnnnnnnnnnnnnnnnnnnnnnnnnnnnnnnnnnnnnnnnnnnnnnnnnnnnnnnnnnnnnnnnnnnnnnnnnnnnnnnnnnnnnnnnnnnnnnnnnnnnnnnnnnnnnnnnnnnnnnnnnnnnnnnnnnnnnnnnnnnnnnnnnnnnnnnnnnnnnnnnnnnnnnnnnnnnnnnnnnnnnnnnnnnnnnnnnnnnnnnnnnnnnnnnnnnnnnnnnnnnnnnnnnnnnnnnnnnnnnnnnnnnnnnnnnnnnnnnnnnnnnnnnnnnnnnnnnnnnnnnnnnnnnnnnnnnnnnnnnnnnnnnnnnnnnnnnnnnnnnnnnnnnnnnnnnnnnnnnnnnnnnnnnnnnnnnnnnnnnnnnnnnnnnnnnnnnnnnnnnnnnnnnnnnnnnnnnnnnnnnnnnnnnnnnnnnnnnnnnnnnnnnnnnnnnnnnnnnnnnnnnnnnnnnnnnnnnnnnnnnnnnnnnnnnnnnnnnnnnnnnnnnnnnnnnnnnnnnnnnnnnnnnnnnnnnnnnnnnnnnnnnnnnnnnnnnnnnnnnnnnnnnnnnnnnnnnnnnnnnnnnnnnnnnnnnnnnnnnnnnnnnnnnnnnnnnnnnnnnnnnnnnnnnnnnnnnnnnnnnnnnnnnnnnnnnnnnnnnnnnnnnnnnnnnnnnnnnnnnnnnnnnnnnnnnnnnnnnnnnnnnnnnnnnnnnnnnnnnnnnnnnnnnnnnnnnnnnnnnnnnnnnnnnnnnnnnnnnnnnnnnnnnnnnnnnnnnnnnnnnnnnnnnnnnnnnnnnnnnnnnnnnnnnnnnnnnnnnnnnnnnnnnnnnnnnnnnnnnnnnnnnnnnnnnnnnnnnnnnnnnnnnnnnnnnnnnnnnnnnnnnnnnnnnnnnnnnnnnnnnnnnnnnnnnnnnnnnnnnnnnnnnnnnnnnnnnnnnnnnnnnnnnnnnnnnnnnnnnnnnnnnnnnnnnnnnnnnnnnnnnnnnnnnnnnnnnnnnnnnnnnnnnnnnnnnnnnnnnnnnnnnnnnnnnnnnnnnnnnnnnnnnnnnnnnnnnnnnnnnnnnnnnnnnnnnnnnnnnnnnnnnnnnnnnnnnnnnnnnnnnnnnnnnnnnnnnnnnnnnnnnnnnnnnnnnnnnnnnnnnnnnnnnnnnnnnnnnnnnnnnnnnnnnnnnnnnnnnnnnnnnnnnnnnnnnnnnnnnnnnnnnnnnnnnnnnnnnnnnnnnnnnnnnnnnnnnnnnnnnnnnnnnnnnnnnnnnnnnnnnnnnnnnnnnnnnnnnnnnnnnnnnnnnnnnnnnnnnnnnnnnnnnnnnnnnnnnnnnnnnnnnnnnnnnnnnnnnnnnnnnnnnnnnnnnnnnnnnnnnnnnnnnnnnnnnnnnnnnnnnnnnnnnnnnnnnnnnnnnnnnnnnnnnnnnnnnnnnnnnnnnnnnnnnnnnnnnnnnnnnnnnnnnnnnnnnnnnnnnnnnnnnnnnnnnnnnnnnnnnnnnnnnnnnnnnnnnnnnnnnnnnnnnnnnnnnnnnnnnnnnnnnnnnnnnnnnnnnnnnnnnnnnnnnnnnnnnnnnnnnnnnnnnnnnnnnnnnnnnnnnnnnnnnnnnnnnnnnnnnnnnnnnnnnnnnnnnnnnnnnnnnnnnnnnnnnnnnnnnnnnnnnnnnnnnnnnnnnnnnnnnnnnnnnnnnnnnnnnnnnnnnnnnnnnnnnnnnnnnnnnnnnnnnnnnnnnnnnnnnnnnnnnnnnnnnnnnnnnnnnnnnnnnnnnnnnnnnnnnnnnnnnnnnnnnnnnnnnnnnnnnnnnnnnnnnnnnnnnnnnnnnnnnnnnnnnnnnnnnnnnnnnnnnnnnnnnnnnnnnnnnnnnnnnnnnnnnnnnnnnnnnnnnnnnnnnnnnnnnnnnnnnnnnnnnnnnnnnnnnnnnnnnnnnnnnnnnnnnnnnnnnnnnnnnnnnnnnnnnnnnnnnnnnnnnnnnnnnnnnnnnnnnnnnnnnnnnnnnnnnnnnnnnnnnnnnnnnnnnnnnnnnnnnnnnnnnnnnnnnnnnnnnnnnnnnnnnnnnnnnnnnnnnnnnnnnnnnnnnnnnnnnnnnnnnnnnnnnnnnnnnnnnnnnnnnnnnnnnnnnnnnnnnnnnnnnnnnnnnnnnnnnnnnnnnnnnnnnnnnnnnnnnnnnnnnnnnnnnnnnnnnnnnnnnnnnnnnnnnnnnnnnnnnnnnnnnnnnnnnnnnnnnnnnnnnnnnnnnnnnnnnnnnnnnnnnnnnnnnnnnnnnnnnnnnnnnnnnnnnnnnnnnnnnnnnnnnnnnnnnnnnnnnnnnnnnnnnnnnnnnnnnnnnnnnnnnnnnnnnnnnnnnnnnnnnnnnnnnnnnnnnnnnnnnnnnnnnnnnnnnnnnnnnnnnnnnnnnnnnnnnnnnnnnnnnnnnnnnnnnnnnnnnnnnnnnnnnnnnnnnnnnnnnnnnnnnnnnnnnnnnnnnnnnnnnnnnnnnnnnnnnnnnnnnnnnnnnnnnnnnnnnnnnnnnnnnnnnnnnnnnnnnnnnnnnnnnnnnnnnnnnnnnnnnnnnnnnnnnnnnnnnnnnnnnnnnnnnnnnnnnnnnnnnnnnnnnnnnnnnnnnnnnnnnnnnnnnnnnnnnnnnnnnnnnnnnnnnnnnnnnnnnnnnnnnnnnnnnnnnnnnnnnnnnnnnnnnnnnnnnnnnnnnnnnnnnnnnnnnnnnnnnnnnnnnnnnnnnnnnnnnnnnnnnnnnnnnnnnnnnnnnnnnnnnnnnnnnnnnnnnnnnnnnnnnnnnnnnnnnnnnnnnnnnnnnnnnnnnnnnnnnnnnnnnnnnnnnnnnnnnnnnnnnnnnnnnnnnnnnnnnnnnnnnnnnnnnnnnnnnnnnnnnnnnnnnnnnnnnnnnnnnnnnnnnnnnnnnnnnnnnnnnnnnnnnnnnnnnnnnnnnnnnnnnnnnnnnnnnnnnnnnnnnnnnnnnnnnnnnnnnnnnnnnnnnnnnnnnnnnnnnnnnnnnnnnnnnnnnnnnnnnnnnnnnnnnnnnnnnnnnnnnnnnnnnnnnnnnnnnnnnnnnnnnnnnnnnnnnnnnnnnnnnnnnnnnnnnnnnnnnnnnnnnnnnnnnnnnnnnnnnnnnnnnnnnnnnnnnnnnnnnnnnnnnnnnnnnnnnnnnnnnnnnnnnnnnnnnnnnnnnnnnnnnnnnnnnnnnnnnnnnnnnnnnnnnnnnnnnnnnnnnnnnnnnnnnnnnnnnnnnnnnnnnnnnnnnnnnnnnnnnnnnnnnnnnnnnnnnnnnnnnnnnnnnnnnnnnnnnnnnnnnnnnnnnnnnnnnnnnnnnnnnnnnnnnnnnnnnnnnnnnnnnnnnnnnnnnnnnnnnnnnnnnnnnnnnnnnnnnnnnnnnnnnnnnnnnnnnnnnnnnnnnnnnnnnnnnnnnnnnnnnnnnnnnnnnnnnnnnnnnnnnnnnnnnnnnnnnnnnnnnnnnnnnnnnnnnnnnnnnnnnnnnnnnnnnnnnnnnnnnnnnnnnnnnnnnnnnnnnnnnnnnnnnnnnnnnnnnnnnnnnnnnnnnnnnnnnnnnnnnnnnnnnnnnnnnnnnnnnnnnnnnnnnnnnnnnnnnnnnnnnnnnnnnnnnnnnnnnnnnnnnnnnnnnnnnnnnnnnnnnnnnnnnnnnnnnnnnnnnnnnnnnnnnnnnnnnnnnnnnnnnnnnnnnnnnnnnnnnnnnnnnnnnnnnnnnnnnnnnnnnnnnnnnnnnnnnnnnnnnnnnnnnnnnnnnnnnnnnnnnnnnnnnnnnnnnnnnnnnnnnnnnnnnnnnnnnnnnnnnnnnnnnnnnnnnnnnnnnnnnnnnnnnnnnnnnnnnnnnnnnnnnnnnnnnnnnnnnnnnnnnnnnnnnnnnnnnnnnnnnnnnnnnnnnnnnnnnnnnnnnnnnnnnnnnnnnnnnnnnnnnnnnnnnnnnnnnnnnnnnnnnnnnnnnnnnnnnnnnnnnnnnnnnnnnnnnnnnnnnnnnnnnnnnnnnnnnnnnnnnnnnnnnnnnnnnnnnnnnnnnnnnnnnnnnnnnnnnnnnnnnnnnnnnnnnnnnnnnnnnnnnnnnnnnnnnnnnnnnnnnnnnnnnnnnnnnnnnnnnnnnnnnnnnnnnnnnnnnnnnnnnnnnnnnnnnnnnnnnnnnnnnnnnnnnnnnnnnnnnnnnnnnnnnnnnnnnnnnnnnnnnnnnnnnnnnnnnnnnnnnnnnnnnnnnnnnnnnnnnnnnnnnnnnnnnnnnnnnnnnnnnnnnnnnnnnnnnnnnnnnnnnnnnnnnnnnnnnnnnnnnnnnnnnnnnnnnnnnnnnnnnnnnnnnnnnnnnnnnnnnnnnnnnnnnnnnnnnnnnnnnnnnnnnnnnnnnnnnnnnnnnnnnnnnnnnnnnnnnnnnnnnnnnnnnnnnnnnnnnnnnnnnnnnnnnnnnnnnnnnnnnnnnnnnnnnnnnnnnnnnnnnnnnnnnnnnnnnnnnnnnnnnnnnnnnnnnnnnnnnnnnnnnnnnnnnnnnnnnnnnnnnnnnnnnnnnnnnnnnnnnnnnnnnnnnnnnnnnnnnnnnnnnnnnnnnnnnnnnnnnnnnnnnnnnnnnnnnnnnnnnnnnnnnnnnnnnnnnnnnnnnnnnnnnnnnnnnnnnnnnnnnnnnnnnnnnnnnnnnnnnnnnnnnnnnnnnnnnnnnnnnnnnnnnnnnnnnnnnnnnnnnnnnnnnnnnnnnnnnnnnnnnnnnnnnnnnnnnnnnnnnnnnnnnnnnnnnnnnnnnnnnnnnnnnnnnnnnnnnnnnnnnnnnnnnnnnnnnnnnnnnnnnnnnnnnnnnnnnnnnnnnnnnnnnnnnnnnnnnnnnnnnnnnnnnnnnnnnnnnnnnnnnnnnnnnnnnnnnnnnnnnnnnnnnnnnnnnnnnnnnnnnnnnnnnnnnnnnnnnnnnnnnnnnnnnnnnnnnnnnnnnnnnnnnnnnnnnnnnnnnnnnnnnnnnnnnnnnnnnnnnnnnnnnnnnnnnnnnnnnnnnnnnnnnnnnnnnnnnnnnnnnnnnnnnnnnnnnnnnnnnnnnnnnnnnnnnnnnnnnnnnnnnnnnnnnnnnnnnnnnnnnnnnnnnnnnnnnnnnnnnnnnnnnnnnnnnnnnnnnnnnnnnnnnnnnnnnnnnnnnnnnnnnnnnnnnnnnnnnnnnnnnnnnnnnnnnnnnnnnnnnnnnnnnnnnnnnnnnnnnnnnnnnnnnnnnnnnnnnnnnnnnnnnnnnnnnnnnnnnnnnnnnnnnnnnnnnnnnnnnnnnnnnnnnnnnnnnnnnnnnnnnnnnnnnnnnnnnnnnnnnnnnnnnnnnnnnnnnnnnnnnnnnnnnnnnnnnnnnnnnnnnnnnnnnnnnnnnnnnnnnnnnnnnnnnnnnnnnnnnnnnnnnnnnnnnnnnnnnnnnnnnnnnnnnnnnnnnnnnnnnnnnnnnnnnnnnnnnnnnnnnnnnnnnnnnnnnnnnnnnnnnnnnnnnnnnnnnnnnnnnnnnnnnnnnnnnnnnnnnnnnnnnnnnnnnnnnnnnnnnnnnnnnnnnnnnnnnnnnnnnnnnnnnnnnnnnnnnnnnnnnnnnnnnnnnnnnnnnnnnnnnnnnnnnnnnnnnnnnnnnnnnnnnnnnnnnnnnnnnnnnnnnnnnnnnnnnnnnnnnnnnnnnnnnnnnnnnnnnnnnnnnnnnnnnnnnnnnnnnnnnnnnnnnnnnnnnnnnnnnnnnnnnnnnnnnnnnnnnnnnnnnnnnnnnnnnnnnnnnnnnnnnnnnnnnnnnnnnnnnnnnnnnnnnnnnnnnnnnnnnnnnnnnnnnnnnnnnnnnnnnnnnnnnnnnnnnnnnnnnnnnnnnnnnnnnnnnnnnnnnnnnnnnnnnnnnnnnnnnnnnnnnnnnnnnnnnnnnnnnnnnnnnnnnnnnnnnnnnnnnnnnnnnnnnnnnnnnnnnnnnnnnnnnnnnnnnnnnnnnnnnnnnnnnnnnnnnnnnnnnnnnnnnnnnnnnnnnnnnnnnnnnnnnnnnnnnnnnnnnnnnnnnnnnnnnnnnnnnnnnnnnnnnnnnnnnnnnnnnnnnnnnnnnnnnnnnnnnnnnnnnnnnnnnnnnnnnnnnnnnnnnnnnnnnnnnnnnnnnnnnnnnnnnnnnnnnnnnnnnnnnnnnnnnnnnnnnnnnnnnnnnnnnnnnnnnnnnnnnnnnnnnnnnnnnnnnnnnnnnnnnnnnnnnnnnnnnnnnnnnnnnnnnnnnnnnnnnnnnnnnnnnnnnnnnnnnnnnnnnnnnnnnnnnnnnnnnnnnnnnnnnnnnnnnnnnnnnnnnnnnnnnnnnnnnnnnnnnnnnnnnnnnnnnnnnnnnnnnnnnnnnnnnnnnnnnnnnnnnnnnnnnnnnnnnnnnnnnnnnnnnnnnnnnnnnnnnnnnnnnnnnnnnnnnnnnnnnnnnnnnnnnnnnnnnnnnnnnnnnnnnnnnnnnnnnnnnnnnnnnnnnnnnnnnnnnnnnnnnnnnnnnnnnnnnnnnnnnnnnnnnnnnnnnnnnnnnnnnnnnnnnnnnnnnnnnnnnnnnnnnnnnnnnnnnnnnnnnnnnnnnnnnnnnnnnnnnnnnnnnnnnnnnnnnnnnnnnnnnnnnnnnnnnnnnnnnnnnnnnnnnnnnnnnnnnnnnnnnnnnnnnnnnnnnnnnnnnnnnnnnnnnnnnnnnnnnnnnnnnnnnnnnnnnnnnnnnnnnnnnnnnnnnnnnnnnnnnnnnnnnnnnnnnnnnnnnnnnnnnnnnnnnnnnnnnnnnnnnnnnnnnnnnnnnnnnnnnnnnnnnnnnnnnnnnnnnnnnnnnnnnnnnnnnnnnnnnnnnnnnnnnnnnnnnnnnnnnnnnnnnnnnnnnnnnnnnnnnnnnnnnnnnnnnnnnnnnnnnnnnnnnnnnnnnnnnnnnnnnnnnnnnnnnnnnnnnnnnnnnnnnnnnnnnnnnnnnnnnnnnnnnnnnnnnnnnnnnnnnnnnnnnnnnnnnnnnnnnnnnnnnnnnnnnnnnnnnnnnnnnnnnnnnnnnnnnnnnnnnnnnnnnnnnnnnnnnnnnnnnnnnnnnnnnnnnnnnnnnnnnnnnnnnnnnnnnnnnnnnnnnnnnnnnnnnnnnnnnnnnnnnnnnnnnnnnnnnnnnnnnnnnnnnnnnnnnnnnnnnnnnnnnnnnnnnnnnnnnnnnnnnnnnnnnnnnnnnnnnnnnnnnnnnnnnnnnnnnnnnnnnnnnnnnnnnnnnnnnnnnnnnnnnnnnnnnnnnnnnnnnnnnnnnnnnnnnnnnnnnnnnnnnnnnnnnnnnnnnnnnnnnnnnnnnnnnnnnnnnnnnnnnnnnnnnnnnnnnnnnnnnnnnnnnnnnnnnnnnnnnnnnnnnnnnnnnnnnnnnnnnnnnnnnnnnnnnnnnnnnnnnnnnnnnnnnnnnnnnnnnnnnnnnnnnnnnnnnnnnnnnnnnnnnnnnnnnnnnnnnnnnnnnnnnnnnnnnnnnnnnnnnnnnnnnnnnnnnnnnnnnnnnnnnnnnnnnnnnnnnnnnnnnnnnnnnnnnnnnnnnnnnnnnnnnnnnnnnnnnnnnnnnnnnnnnnnnnnnnnnnnnnnnnnnnnnnnnnnnnnnnnnnnnnnnnnnnnnnnnnnnnnnnnnnnnnnnnnnnnnnnnnnnnnnnnnnnnnnnnnnnnnnnnnnnnnnnnnnnnnnnnnnnnnnnnnnnnnnnnnnnnnnnnnnnnnnnnnnnnnnnnnnnnnnnnnnnnnnnnnnnnnnnnnnnnnnnnnnnnnnnnnnnnnnnnnnnnnnnnnnnnnnnnnnnnnnnnnnnnnnnnnnnnnnnnnnnnnnnnnnnnnnnnnnnnnnnnnnnnnnnnnnnnnnnnnnnnnnnnnnnnnnnnnnnnnnnnnnnnnnnnnnnnnnnnnnnnnnnnnnnnnnnnnnnnnnnnnnnnnnnnnnnnnnnnnnnnnnnnnnnnnnnnnnnnnnnnnnnnnnnnnnnnnnnnnnnnnnnnnnnnnnnnnnnnnnnnnnnnnnnnnnnnnnnnnnnnnnnnnnnnnnnnnnnnnnnnnnnnnnnnnnnnnnnnnnnnnnnnnnnnnnnnnnnnnnnnnnnnnnnnnnnnnnnnnnnnnnnnnnnnnnnnnnnnnnnnnnnnnnnnnnnnnnnnnnnnnnnnnnnnnnnnnnnnnnnnnnnnnnnnnnnnnnnnnnnnnnnnnnnnnnnnnnnnnnnnnnnnnnnnnnnnnnnnnnnnnnnnnnnnnnnnnnnnnnnnnnnnnnnnnnnnnnnnnnnnnnnnnnnnnnnnnnnnnnnnnnnnnnnnnnnnnnnnnnnnnnnnnnnnnnnnnnnnnnnnnnnnnnnnnnnnnnnnnnnnnnnnnnnnnnnnnnnnnnnnnnnnnnnnnnnnnnnnnnnnnnnnnnnnnnnnnnnnnnnnnnnnnnnnnnnnnnnnnnnnnnnnnnnnnnnnnnnnnnnnnnnnnnnnnnnnnnnnnnnnnnnnnnnnnnnnnnnnnnnnnnnnnnnnnnnnnnnnnnnnnnnnnnnnnnnnnnnnnnnnnnnnnnnnnnnnnnnnnnnnnnnnnnnnnnnnnnnnnnnnnnnnnnnnnnnnnnnnnnnnnnnnnnnnnnnnnnnnnnnnnnnnnnnnnnnnnnnnnnnnnnnnnnnnnnnnnnnnnnnnnnnnnnnnnnnnnnnnnnnnnnnnnnnnnnnnnnnnnnnnnnnnnnnnnnnnnnnnnnnnnnnnnnnnnnnnnnnnnnnnnnnnnnnnnnnnnnnnnnnnnnnnnnnnnnnnnnnnnnnnnnnnnnnnnnnnnnnnnnnnnnnnnnnnnnnnnnnnnnnnnnnnnnnnnnnnnnnnnnnnnnnnnnnnnnnnnnnnnnnnnnnnnnnnnnnnnnnnnnnnnnnnnnnnnnnnnnnnnnnnnnnnnnnnnnnnnnnnnnnnnnnnnnnnnnnnnnnnnnnnnnnnnnnnnnnnnnnnnnnnnnnnnnnnnnnnnnnnnnnnnnnnnnnnnnnnnnnnnnnnnnnnnnnnnnnnnnnnnnnnnnnnnnnnnnnnnnnnnnnnnnnnnnnnnnnnnnnnnnnnnnnnnnnnnnnnnnnnnnnnnnnnnnnnnnnnnnnnnnnnnnnnnnnnnnnnnnnnnnnnnnnnnnnnnnnnnnnnnnnnnnnnnnnnnnnnnnnnnnnnnnnnnnnnnnnnnnnnnnnnnnnnnnnnnnnnnnnnnnnnnnnnnnnnnnnnnnnnnnnnnnnnnnnnnnnnnnnnnnnnnnnnnnnnnnnnnnnnnnnnnnnnnnnnnnnnnnnnnnnnnnnnnnnnnnnnnnnnnnnnnnnnnnnnnnnnnnnnnnnnnnnnnnnnnnnnnnnnnnnnnnnnnnnnnnnnnnnnnnnnnnnnnnnnnnnnnnnnnnnnnnnnnnnnnnnnnnnnnnnnnnnnnnnnnnnnnnnnnnnnnnnnnnnnnnnnnnnnnnnnnnnnnnnnnnnnnnnnnnnnnnnnnnnnnnnnnnnnnnnnnnnnnnnnnnnnnnnnnnnnnnnnnnnnnnnnnnnnnnnnnnnnnnnnnnnnnnnnnnnnnnnnnnnnnnnnnnnnnnnnnnnnnnnnnnnnnnnnnnnnnnnnnnnnnnnnnnnnnnnnnnnnnnnnnnnnnnnnnnnnnnnnnnnnnnnnnnnnnnnnnnnnnnnnnnnnnnnnnnnnnnnnnnnnnnnnnnnnnnnnnnnnnnnnnnnnnnnnnnnnnnnnnnnnnnnnnnnnnnnnnnnnnnnnnnnnnnnnnnnnnnnnnnnnnnnnnnnnnnnnnnnnnnnnnnnnnnnnnnnnnnnnnnnnnnnnnnnnnnnnnnnnnnnnnnnnnnnnnnnnnnnnnnnnnnnnnnnnnnnnnnnnnnnnnnnnnnnnnnnnnnnnnnnnnnnnnnnnnnnnnnnnnnnnnnnnnnnnnnnnnnnnnnnnnnnnnnnnnnnnnnnnnnnnnnnnnnnnnnnnnnnnnnnnnnnnnnnnnnnnnnnnnnnnnnnnnnnnnnnnnnnnnnnnnnnnnnnnnnnnnnnnnnnnnnnnnnnnnnnnnnnnnnnnnnnnnnnnnnnnnnnnnnnnnnnnnnnnnnnnnnnnnnnnnnnnnnnnnnnnnnnnnnnnnnnnnnnnnnnnnnnnnnnnnnnnnnnnnnnnnnnnnnnnnnnnnnnnnnnnnnnnnnnnnnnnnnnnnnnnnnnnnnnnnnnnnnnnnnnnnnnnnnnnnnnnnnnnnnnnnnnnnnnnnnnnnnnnnnnnnnnnnnnnnnnnnnnnnnnnnnnnnnnnnnnnnnnnnnnnnnnnnnnnnnnnnnnnnnnnnnnnnnnnnnnnnnnnnnnnnnnnnnnnnnnnnnnnnnnnnnnnnnnnnnnnnnnnnnnnnnnnnnnnnnnnnnnnnnnnnnnnnnnnnnnnnnnnnnnnnnnnnnnnnnnnnnnnnnnnnnnnnnnnnnnnnnnnnnnnnnnnnnnnnnnnnnnnnnnnnnnnnnnnnnnnnnnnnnnnnnnnnnnnnnnnnnnnnnnnnnnnnnnnnnnnnnnnnnnnnnnnnnnnnnnnnnnnnnnnnnnnnnnnnnnnnnnnnnnnnnnnnnnnnnnnnnnnnnnnnnnnnnnnnnnnnnnnnnnnnnnnnnnnnnnnnnnnnnnnnnnnnnnnnnnnnnnnnnnnnnnnnnnnnnnnnnnnnnnnnnnnnnnnnnnnnnnnnnnnnnnnnnnnnnnnnnnnnnnnnnnnnnnnnnnnnnnnnnnnnnnnnnnnnnnnnnnnnnnnnnnnnnnnnnnnnnnnnnnnnnnnnnnnnnnnnnnnnnnnnnnnnnnnnnnnnnnnnnnnnnnnnnnnnnnnnnnnnnnnnnnnnnnnnnnnnnnnnnnnnnnnnnnnnnnnnnnnnnnnnnnnnnnnnnnnnnnnnnnnnnnnnnnnnnnnnnnnnnnnnnnnnnnnnnnnnnnnnnnnnnnnnnnnnnnnnnnnnnnnnnnnnnnnnnnnnnnnnnnnnnnnnnnnnnnnnnnnnnnnnnnnnnnnnnnnnnnnnnnnnnnnnnnnnnnnnnnnnnnnnnnnnnnnnnnnnnnnnnnnnnnnnnnnnnnnnnnnnnnnnnnnnnnnnnnnnnnnnnnnnnnnnnnnnnnnnnnnnnnnnnnnnnnnnnnnnnnnnnnnnnnnnnnnnnnnnnnnnnnnnnnnnnnnnnnnnnnnnnnnnnnnnnnnnnnnnnnnnnnnnnnnnnnnnnnnnnnnnnnnnnnnnnnnnnnnnnnnnnnnnnnnnnnnnnnnnnnnnnnnnnnnnnnnnnnnnnnnnnnnnnnnnnnnnnnnnnnnnnnnnnnnnnnnnnnnnnnnnnnnnnnnnnnnnnnnnnnnnnnnnnnnnnnnnnnnnnnnnnnnnnnnnnnnnnnnnnnnnnnnnnnnnnnnnnnnnnnnnnnnnnnnnnnnnnnnnnnnnnnnnnnnnnnnnnnnnnnnnnnnnnnnnnnnnnnnnnnnnnnnnnnnnnnnnnnnnnnnnnnnnnnnnnnnnnnnnnnnnnnnnnnnnnnnnnnnnnnnnnnnnnnnnnnnnnnnnnnnnnnnnnnnnnnnnnnnnnnnnnnnnnnnnnnnnnnnnnnnnnnnnnnnnnnnnnnnnnnnnnnnnnnnnnnnnnnnnnnnnnnnnnnnnnnnnnnnnnnnnnnnnnnnnnnnnnnnnnnnnnnnnnnnnnnnnnnnnnnnnnnnnnnnnnnnnnnnnnnnnnnnnnnnnnnnnnnnnnnnnnnnnnnnnnnnnnnnnnnnnnnnnnnnnnnnnnnnnnnnnnnnnnnnnnnnnnnnnnnnnnnnnnnnnnnnnnnnnnnnnnnnnnnnnnnnnnnnnnnnnnnnnnnnnnnnnnnnnnnnnnnnnnnnnnnnnnnnnnnnnnnnnnnnnnnnnnnnnnnnnnnnnnnnnnnnnnnnnnnnnnnnnnnnnnnnnnnnnnnnnnnnnnnnnnnnnnnnnnnnnnnnnnnnnnnnnnnnnnnnnnnnnnnnnnnnnnnnnnnnnnnnnnnnnnnnnnnnnnnnnnnnnnnnnnnnnnnnnnnnnnnnnnnnnnnnnnnnnnnnnnnnnnnnnnnnnnnnnnnnnnnnnnnnnnnnnnnnnnnnnnnnnnnnnnnnnnnnnnnnnnnnnnnnnnnnnnnnnnnnnnnnnnnnnnnnnnnnnnnnnnnnnnnnnnnnnnnnnnnnnnnnnnnnnnnnnnnnnnnnnnnnnnnnnnnnnnnnnnnnnnnnnnnnnnnnnnnnnnnnnnnnnnnnnnnnnnnnnnnnnnnnnnnnnnnnnnnnnnnnnnnnnnnnnnnnnnnnnnnnnnnnnnnnnnnnnnnnnnnnnnnnnnnnnnnnnnnnnnnnnnnnnnnnnnnnnnnnnnnnnnnnnnnnnnnnnnnnnnnnnnnnnnnnnnnnnnnnnnnnnnnnnnnnnnnnnnnnnnnnnnnnnnnnnnnnnnnnnnnnnnnnnnnnnnnnnnnnnnnnnnnnnnnnnnnnnnnnnnnnnnnnnnnnnnnnnnnnnnnnnnnnnnnnnnnnnnnnnnnnnnnnnnnnnnnnnnnnnnnnnnnnnnnnnnnnnnnnnnnnnnnnnnnnnnnnnnnnnnnnnnnnnnnnnnnnnnnnnnnnnnnnnnnnnnnnnnnnnnnnnnnnnnnnnnnnnnnnnnnnnnnnnnnnnnnnnnnnnnnnnnnnnnnnnnnnnnnnnnnnnnnnnnnnnnnnnnnnnnnnnnnnnnnnnnnnnnnnnnnnnnnnnnnnnnnnnnnnnnnnnnnnnnnnnnnnnnnnnnnnnnnnnnnnnnnnnnnnnnnnnnnnnnnnnnnnnnnnnnnnnnnnnnnnnnnnnnnnnnnnnnnnnnnnnnnnnnnnnnnnnnnnnnnnnnnnnnnnnnnnnnnnnnnnnnnnnnnnnnnnnnnnnnnnnnnnnnnnnnnnnnnnnnnnnnnnnnnnnnnnnnnnnnnnnnnnnnnnnnnnnnnnnnnnnnnnnnnnnnnnnnnnnnnnnnnnnnnnnnnnnnnnnnnnnnnnnnnnnnnnnnnnnnnnnnnnnnnnnnnnnnnnnnnnnnnnnnnnnnnnnnnnnnnnnnnnnnnnnnnnnnnnnnnnnnnnnnnnnnnnnnnnnnnnnnnnnnnnnnnnnnnnnnnnnnnnnnnnnnnnnnnnnnnnnnnnnnnnnnnnnnnnnnnnnnnnnnnnnnnnnnnnnnnnnnnnnnnnnnnnnnnnnnnnnnnnnnnnnnnnnnnnnnnnnnnnnnnnnnnnnnnnnnnnnnnnnnnnnnnnnnnnnnnnnnnnnnnnnnnnnnnnnnnnnnnnnnnnnnnnnnnnnnnnnnnnnnnnnnnnnnnnnnnnnnnnnnnnnnnnnnnnnnnnnnnnnnnnnnnnnnnnnnnnnnnnnnnnnnnnnnnnnnnnnnnnnnnnnnnnnnnnnnnnnnnnnnnnnnnnnnnnnnnnnnnnnnnnnnnnnnnnnnnnnnnnnnnnnnnnnnnnnnnnnnnnnnnnnnnnnnnnnnnnnnnnnnnnnnnnnnnnnnnnnnnnnnnnnnnnnnnnnnnnnnnnnnnnnnnnnnnnnnnnnnnnnnnnnnnnnnnnnnnnnnnnnnnnnnnnnnnnnnnnnnnnnnnnnnnnnnnnnnnnnnnnnnnnnnnnnnnnnnnnnnnnnnnnnnnnnnnnnnnnnnnnnnnnnnnnnnnnnnnnnnnnnnnnnnnnnnnnnnnnnnnnnnnnnnnnnnnnnnnnnnnnnnnnnnnnnnnnnnnnnnnnnnnnnnnnnnnnnnnnnnnnnnnnnnnnnnnnnnnnnnnnnnnnnnnnnnnnnnnnnnnnnnnnnnnnnnnnnnnnnnnnnnnnnnnnnnnnnnnnnnnnnnnnnnnnnnnnnnnnnnnnnnnnnnnnnnnnnnnnnnnnnnnnnnnnnnnnnnnnnnnnnnnnnnnnnnnnnnnnnnnnnnnnnnnnnnnnnnnnnnnnnnnnnnnnnnnnnnnnnnnnnnnnnnnnnnnnnnnnnnnnnnnnnnnnnnnnnnnnnnnnnnnnnnnnnnnnnnnnnnnnnnnnnnnnnnnnnnnnnnnnnnnnnnnnnnnnnnnnnnnnnnnnnnnnnnnnnnnnnnnnnnnnnnnnnnnnnnnnnnnnnnnnnnnnnnnnnnnnnnnnnnnnnnnnnnnnnnnnnnnnnnnnnnnnnnnnnnnnnnnnnnnnnnnnnnnnnnnnnnnnnnnnnnnnnnnnnnnnnnnnnnnnnnnnnnnnnnnnnnnnnnnnnnnnnnnnnnnnnnnnnnnnnnnnnnnnnnnnnnnnnnnnnnnnnnnnnnnnnnnnnnnnnnnnnnnnnnnnnnnnnnnnnnnnnnnnnnnnnnnnnnnnnnnnnnnnnnnnnnnnnnnnnnnnnnnnnnnnnnnnnnnnnnnnnnnnnnnnnnnnnnnnnnnnnnnnnnnnnnnnnnnnnnnnnnnnnnnnnnnnnnnnnnnnnnnnnnnnnnnnnnnnnnnnnnnnnnnnnnnnnnnnnnnnnnnnnnnnnnnnnnnnnnnnnnnnnnnnnnnnnnnnnnnnnnnnnnnnnnnnnnnnnnnnnnnnnnnnnnnnnnnnnnnnnnnnnnnnnnnnnnnnnnnnnnnnnnnnnnnnnnnnnnnnnnnnnnnnnnnnnnnnnnnnnnnnnnnnnnnnnnnnnnnnnnnnnnnnnnnnnnnnnnnnnnnnnnnnnnnnnnnnnnnnnnnnnnnnnnnnnnnnnnnnnnnnnnnnnnnnnnnnnnnnnnnnnnnnnnnnnnnnnnnnnnnnnnnnnnnnnnnnnnnnnnnnnnnnnnnnnnnnnnnnnnnnnnnnnnnnnnnnnnnnnnnnnnnnnnnnnnnnnnnnnnnnnnnnnnnnnnnnnnnnnnnnnnnnnnnnnnnnnnnnnnnnnnnnnnnnnnnnnnnnnnnnnnnnnnnnnnnnnnnnnnnnnnnnnnnnnnnnnnnnnnnnnnnnnnnnnnnnnnnnnnnnnnnnnnnnnnnnnnnnnnnnnnnnnnnnnnnnnnnnnnnnnnnnnnnnnnnnnnnnnnnnnnnnnnnnnnnnnnnnnnnnnnnnnnnnnnnnnnnnnnnnnnnnnnnnnnnnnnnnnnnnnnnnnnnnnnnnnnnnnnnnnnnnnnnnnnnnnnnnnnnnnnnnnnnnnnnnnnnnnnnnnnnnnnnnnnnnnnnnnnnnnnnnnnnnnnnnnnnnnnnnnnnnnnnnnnnnnnnnnnnnnnnnnnnnnnnnnnnnnnnnnnnnnnnnnnnnnnnnnnnnnnnnnnnnnnnnnnnnnnnnnnnnnnnnnnnnnnnnnnnnnnnnnnnnnnnnnnnnnnnnnnnnnnnnnnnnnnnnnnnnnnnnnnnnnnnnnnnnnnnnnnnnnnnnnnnnnnnnnnnnnnnnnnnnnnnnnnnnnnnnnnnnnnnnnnnnnnnnnnnnnnnnnnnnnnnnnnnnnnnnnnnnnnnnnnnnnnnnnnnnnnnnnnnnnnnnnnnnnnnnnnnnnnnnnnnnnnnnnnnnnnnnnnnnnnnnnnnnnnnnnnnnnnnnnnnnnnnnnnnnnnnnnnnnnnnnnnnnnnnnnnnnnnnnnnnnnnnnnnnnnnnnnnnnnnnnnnnnnnnnnnnnnnnnnnnnnnnnnnnnnnnnnnnnnnnnnnnnnnnnnnnnnnnnnnnnnnnnnnnnnnnnnnnnnnnnnnnnnnnnnnnnnnnnnnnnnnnnnnnnnnnnnnnnnnnnnnnnnnnnnnnnnnnnnnnnnnnnnnnnnnnnnnnnnnnnnnnnnnnnnnnnnnnnnnnnnnnnnnnnnnnnnnnnnnnnnnnnnnnnnnnnnnnnnnnnnnnnnnnnnnnnnnnnnnnnnnnnnnnnnnnnnnnnnnnnnnnnnnnnnnnnnnnnnnnnnnnnnnnnnnnnnnnnnnnnnnnnnnnnnnnnnnnnnnnnnnnnnnnnnnnnnnnnnnnnnnnnnnnnnnnnnnnnnnnnnnnnnnnnnnnnnnnnnnnnnnnnnnnnnnnnnnnnnnnnnnnnnnnnnnnnnnnnnnnnnnnnnnnnnnnnnnnnnnnnnnnnnnnnnnnnnnnnnnnnnnnnnnnnnnnnnnnnnnnnnnnnnnnnnnnnnnnnnnnnnnnnnnnnnnnnnnnnnnnnnnnnnnnnnnnnnnnnnnnnnnnnnnnnnnnnnnnnnnnnnnnnnnnnnnnnnnnnnnnnnnnnnnnnnnnnnnnnnnnnnnnnnnnnnnnnnnnnnnnnnnnnnnnnnnnnnnnnnnnnnnnnnnnnnnnnnnnnnnnnnnnnnnnnnnnnnnnnnnnnnnnnnnnnnnnnnnnnnnnnnnnnnnnnnnnnnnnnnnnnnnnnnnnnnnnnnnnnnnnnnnnnnnnnnnnnnnnnnnnnnnnnnnnnnnnnnnnnnnnnnnnnnnnnnnnnnnnnnnnnnnnnnnnnnnnnnnnnnnnnnnnnnnnnnnnnnnnnnnnnnnnnnnnnnnnnnnnnnnnnnnnnnnnnnnnnnnnnnnnnnnnnnnnnnnnnnnnnnnnnnnnnnnnnnnnnnnnnnnnnnnnnnnnnnnnnnnnnnnnnnnnnnnnnnnnnnnnnnnnnnnnnnnnnnnnnnnnnnnnnnnnnnnnnnnnnnnnnnnnnnnnnnnnnnnnnnnnnnnnnnnnnnnnnnnnnnnnnnnnnnnnnnnnnnnnnnnnnnnnnnnnnnnnnnnnnnnnnnnnnnnnnnnnnnnnnnnnnnnnnnnnnnnnnnnnnnnnnnnnnnnnnnnnnnnnnnnnnnnnnnnnnnnnnnnnnnnnnnnnnnnnnnnnnnnnnnnnnnnnnnnnnnnnnnnnnnnnnnnnnnnnnnnnnnnnnnnnnnnnnnnnnnnnnnnnnnnnnnnnnnnnnnnnnnnnnnnnnnnnnnnnnnnnnnnnnnnnnnnnnnnnnnnnnnnnnnnnnnnnnnnnnnnnnnnnnnnnnnnnnnnnnnnnnnnnnnnnnnnnnnnnnnnnnnnnnnnnnnnnnnnnnnnnnnnnnnnnnnnnnnnnnnnnnnnnnnnnnnnnnnnnnnnnnnnnnnnnnnnnnnnnnnnnnnnnnnnnnnnnnnnnnnnnnnnnnnnnnnnnnnnnnnnnnnnnnnnnnnnnnnnnnnnnnnnnnnnnnnnnnnnnnnnnnnnnnnnnnnnnnnnnnnnnnnnnnnnnnnnnnnnnnnnnnnnnnnnnnnnnnnnnnnnnnnnnnnnnnnnnnnnnnnnnnnnnnnnnnnnnnnnnnnnnnnnnnnnnnnnnnnnnnnnnnnnnnnnnnnnnnnnnnnnnnnnnnnnnnnnnnnnnnnnnnnnnnnnnnnnnnnnnnnnnnnnnnnnnnnnnnnnnnnnnnnnnnnnnnnnnnnnnnnnnnnnnnnnnnnnnnnnnnnnnnnnnnnnnnnnnnnnnnnnnnnnnnnnnnnnnnnnnnnnnnnnnnnnnnnnnnnnnnnnnnnnnnnnnnnnnnnnnnnnnnnnnnnnnnnnnnnnnnnnnnnnnnnnnnnnnnnnnnnnnnnnnnnnnnnnnnnnnnnnnnnnnnnnnnnnnnnnnnnnnnnnnnnnnnnnnnnnnnnnnnnnnnnnnnnnnnnnnnnnnnnnnnnnnnnnnnnnnnnnnnnnnnnnnnnnnnnnnnnnnnnnnnnnnnnnnnnnnnnnnnnnnnnnnnnnnnnnnnnnnnnnnnnnnnnnnnnnnnnnnnnnnnnnnnnnnnnnnnnnnnnnnnnnnnnnnnnnnnnnnnnnnnnnnnnnnnnnnnnnnnnnnnnnnnnnnnnnnnnnnnnnnnnnnnnnnnnnnnnnnnnnnnnnnnnnnnnnnnnnnnnnnnnnnnnnnnnnnnnnnnnnnnnnnnnnnnnnnnnnnnnnnnnnnnnnnnnnnnnnnnnnnnnnnnnnnnnnnnnnnnnnnnnnnnnnnnnnnnnnnnnnnnnnnnnnnnnnnnnnnnnnnnnnnnnnnnnnnnnnnnnnnnnnnnnnnnnnnnnnnnnnnnnnnnnnnnnnnnnnnnnnnnnnnnnnnnnnnnnnnnnnnnnnnnnnnnnnnnnnnnnnnnnnnnnnnnnnnnnnnnnnnnnnnnnnnnnnnnnnnnnnnnnnnnnnnnnnnnnnnnnnnnnnnnnnnnnnnnnnnnnnnnnnnnnnnnnnnnnnnnnnnnnnnnnnnnnnnnnnnnnnnnnnnnnnnnnnnnnnnnnnnnnnnnnnnnnnnnnnnnnnnnnnnnnnnnnnnnnnnnnnnnnnnnnnnnnnnnnnnnnnnnnnnnnnnnnnnnnnnnnnnnnnnnnnnnnnnnnnnnnnnnnnnnnnnnnnnnnnnnnnnnnnnnnnnnnnnnnnnnnnnnnnnnnnnnnnnnnnnnnnnnnnnnnnnnnnnnnnnnnnnnnnnnnnnnnnnnnnnnnnnnnnnnnnnnnnnnnnnnnnnnnnnnnnnnnnnnnnnnnnnnnnnnnnnnnnnnnnnnnnnnnnnnnnnnnnnnnnnnnnnnnnnnnnnnnnnnnnnnnnnnnnnnnnnnnnnnnnnnnnnnnnnnnnnnnnnnnnnnnnnnnnnnnnnnnnnnnnnnnnnnnnnnnnnnnnnnnnnnnnnnnnnnnnnnnnnnnnnnnnnnnnnnnnnnnnnnnnnnnnnnnnnnnnnnnnnnnnnnnnnnnnnnnnnnnnnnnnnnnnnnnnnnnnnnnnnnnnnnnnnnnnnnnnnnnnnnnnnnnnnnnnnnnnnnnnnnnnnnnnnnnnnnnnnnnnnnnnnnnnnnnnnnnnnnnnnnnnnnnnnnnnnnnnnnnnnnnnnnnnnnnnnnnnnnnnnnnnnnnnnnnnnnnnnnnnnnnnnnnnnnnnnnnnnnnnnnnnnnnnnnnnnnnnnnnnnnnnnnnnnnnnnnnnnnnnnnnnnnnnnnnnnnnnnnnnnnnnnnnnnnnnnnnnnnnnnnnnnnnnnnnnnnnnnnnnnnnnnnnnnnnnnnnnnnnnnnnnnnnnnnnnnnnnnnnnnnnnnnnnnnnnnnnnnnnnnnnnnnnnnnnnnnnnnnnnnnnnnnnnnnnnnnnnnnnnnnnnnnnnnnnnnnnnnnnnnnnnnnnnnnnnnnnnnnnnnnnnnnnnnnnnnnnnnnnnnnnnnnnnnnnnnnnnnnnnnnnnnnnnnnnnnnnnnnnnnnnnnnnnnnnnnnnnnnnnnnnnnnnnnnnnnnnnnnnnnnnnnnnnnnnnnnnnnnnnnnnnnnnnnnnnnnnnnnnnnnnnnnnnnnnnnnnnnnnnnnnnnnnnnnnnnnnnnnnnnnnnnnnnnnnnnnnnnnnnnnnnnnnnnnnnnnnnnnnnnnnnnnnnnnnnnnnnnnnnnnnnnnnnnnnnnnnnnnnnnnnnnnnnnnnnnnnnnnnnnnnnnnnnnnnnnnnnnnnnnnnnnnnnnnnnnnnnnnnnnnnnnnnnnnnnnnnnnnnnnnnnnnnnnnnnnnnnnnnnnnnnnnnnnnnnnnnnnnnnnnnnnnnnnnnnnnnnnnnnnnnnnnnnnnnnnnnnnnnnnnnnnnnnnnnnnnnnnnnnnnnnnnnnnnnnnnnnnnnnnnnnnnnnnnnnnnnnnnnnnnnnnnnnnnnnnnnnnnnnnnnnnnnnnnnnnnnnnnnnnnnnnnnnnnnnnnnnnnnnnnnnnnnnnnnnnnnnnnnnnnnnnnnnnnnnnnnnnnnnnnnnnnnnnnnnnnnnnnnnnnnnnnnnnnnnnnnnnnnnnnnnnnnnnnnnnnnnnnnnnnnnnnnnnnnnnnnnnnnnnnnnnnnnnnnnnnnnnnnnnnnnnnnnnnnnnnnnnnnnnnnnnnnnnnnnnnnnnnnnnnnnnnnnnnnnnnnnnnnnnnnnnnnnnnnnnnnnnnnnnnnnnnnnnnnnnnnnnnnnnnnnnnnnnnnnnnnnnnnnnnnnnnnnnnnnnnnnnnnnnnnnnnnnnnnnnnnnnnnnnnnnnnnnnnnnnnnnnnnnnnnnnnnnnnnnnnnnnnnnnnnnnnnnnnnnnnnnnnnnnnnnnnnnnnnnnnnnnnnnnnnnnnnnnnnnnnnnnnnnnnnnnnnnnnnnnnnnnnnnnnnnnnnnnnnnnnnnnnnnnnnnnnnnnnnnnnnnnnnnnnnnnnnnnnnnnnnnnnnnnnnnnnnnnnnnnnnnnnnnnnnnnnnnnnnnnnnnnnnnnnnnnnnnnnnnnnnnnnnnnnnnnnnnnnnnnnnnnnnnnnnnnnnnnnnnnnnnnnnnnnnnnnnnnnnnnnnnnnnnnnnnnnnnnnnnnnnnnnnnnnnnnnnnnnnnnnnnnnnnnnnnnnnnnnnnnnnnnnnnnnnnnnnnnnnnnnnnnnnnnnnnnnnnnnnnnnnnnnnnnnnnnnnnnnnnnnnnnnnnnnnnnnnnnnnnnnnnnnnnnnnnnnnnnnnnnnnnnnnnnnnnnnnnnnnnnnnnnnnnnnnnnnnnnnnnnnnnnnnnnnnnnnnnnnnnnnnnnnnnnnnnnnnnnnnnnnnnnnnnnnnnnnnnnnnnnnnnnnnnnnnnnnnnnnnnnnnnnnnnnnnnnnnnnnnnnnnnnnnnnnnnnnnnnnnnnnnnnnnnnnnnnnnnnnnnnnnnnnnnnnnnnnnnnnnnnnnnnnnnnnnnnnnnnnnnnnnnnnnnnnnnnnnnnnnnnnnnnnnnnnnnnnnnnnnnnnnnnnnnnnnnnnnnnnnnnnnnnnnnnnnnnnnnnnnnnnnnnnnnnnnnnnnnnnnnnnnnnnnnnnnnnnnnnnnnnnnnnnnnnnnnnnnnnnnnnnnnnnnnnnnnnnnnnnnnnnnnnnnnnnnnnnnnnnnnnnnnnnnnnnnnnnnnnnnnnnnnnnnnnnnnnnnnnnnnnnnnnnnnnnnnnnnnnnnnnnnnnnnnnnnnnnnnnnnnnnnnnnnnnnnnnnnnnnnnnnnnnnnnnnnnnnnnnnnnnnnnnnnnnnnnnnnnnnnnnnnnnnnnnnnnnnnnnnnnnnnnnnnnnnnnnnnnnnnnnnnnnnnnnnnnnnnnnnnnnnnnnnnnnnnnnnnnnnnnnnnnnnnnnnnnnnnnnnnnnnnnnnnnnnnnnnnnnnnnnnnnnnnnnnnnnnnnnnnnnnnnnnnnnnnnnnnnnnnnnnnnnnnnnnnnnnnnnnnnnnnnnnnnnnnnnnnnnnnnnnnnnnnnnnnnnnnnnnnnnnnnnnnnnnnnnnnnnnnnnnnnnnnnnnnnnnnnnnnnnnnnnnnnnnnnnnnnnnnnnnnnnnnnnnnnnnnnnnnnnnnnnnnnnnnnnnnnnnnnnnnnnnnnnnnnnnnnnnnnnnnnnnnnnnnnnnnnnnnnnnnnnnnnnnnnnnnnnnnnnnnnnnnnnnnnnnnnnnnnnnnnnnnnnnnnnnnnnnnnnnnnnnnnnnnnnnnnnnnnnnnnnnnnnnnnnnnnnnnnnnnnnnnnnnnnnnnnnnnnnnnnnnnnnnnnnnnnnnnnnnnnnnnnnnnnnnnnnnnnnnnnnnnnnnnnnnnnnnnnnnnnnnnnnnnnnnnnnnnnnnnnnnnnnnnnnnnnnnnnnnnnnnnnnnnnnnnnnnnnnnnnnnnnnnnnnnnnnnnnnnnnnnnnnnnnnnnnnnnnnnnnnnnnnnnnnnnnnnnnnnnnnnnnnnnnnnnnnnnnnnnnnnnnnnnnnnnnnnnnnnnnnnnnnnnnnnnnnnnnnnnnnnnnnnnnnnnnnnnnnnnnnnnnnnnnnnnnnnnnnnnnnnnnnnnnnnnnnnnnnnnnnnnnnnnnnnnnnnnnnnnnnnnnnnnnnnnnnnnnnnnnnnnnnnnnnnnnnnnnnnnnnnnnnnnnnnnnnnnnnnnnnnnnnnnnnnnnnnnnnnnnnnnnnnnnnnnnnnnnnnnnnnnnnnnnnnnnnnnnnnnnnnnnnnnnnnnnnnnnnnnnnnnnnnnnnnnnnnnnnnnnnnnnnnnnnnnnnnnnnnnnnnnnnnnnnnnnnnnnnnnnnnnnnnnnnnnnnnnnnnnnnnnnnnnnnnnnnnnnnnnnnnnnnnnnnnnnnnnnnnnnnnnnnnnnnnnnnnnnnnnnnnnnnnnnnnnnnnnnnnnnnnnnnnnnnnnnnnnnnnnnnnnnnnnnnnnnnnnnnnnnnnnnnnnnnnnnnnnnnnnnnnnnnnnnnnnnnnnnnnnnnnnnnnnnnnnnnnnnnnnnnnnnnnnnnnnnnnnnnnnnnnnnnnnnnnnnnnnnnnnnnnnnnnnnnnnnnnnnnnnnnnnnnnnnnnnnnnnnnnnnnnnnnnnnnnnnnnnnnnnnnnnnnnnnnnnnnnnnnnnnnnnnnnnnnnnnnnnnnnnnnnnnnnnnnnnnnnnnnnnnnnnnnnnnnnnnnnnnnnnnnnnnnnnnnnnnnnnnnnnnnnnnnnnnnnnnnnnnnnnnnnnnnnnnnnnnnnnnnnnnnnnnnnnnnnnnnnnnnnnnnnnnnnnnnnnnnnnnnnnnnnnnnnnnnnnnnnnnnnnnnnnnnnnnnnnnnnnnnnnnnnnnnnnnnnnnnnnnnnnnnnnnnnnnnnnnnnnnnnnnnnnnnnnnnnnnnnnnnnnnnnnnnnnnnnnnnnnnnnnnnnnnnnnnnnnnnnnnnnnnnnnnnnnnnnnnnnnnnnnnnnnnnnnnnnnnnnnnnnnnnnnnnnnnnnnnnnnnnnnnnnnnnnnnnnnnnnnnnnnnnnnnnnnnnnnnnnnnnnnnnnnnnnnnnnnnnnnnnnnnnnnnnnnnnnnnnnnnnnnnnnnnnnnnnnnnnnnnnnnnnnnnnnnnnnnnnnnnnnnnnnnnnnnnnnnnnnnnnnnnnnnnnnnnnnnnnnnnnnnnnnnnnnnnnnnnnnnnnnnnnnnnnnnnnnnnnnnnnnnnnnnnnnnnnnnnnnnnnnnnnnnnnnnnnnnnnnnnnnnnnnnnnnnnnnnnnnnnnnnnnnnnnnnnnnnnnnnnnnnnnnnnnnnnnnnnnnnnnnnnnnnnnnnnnnnnnnnnnnnnnnnnnnnnnnnnnnnnnnnnnnnnnnnnnnnnnnnnnnnnnnnnnnnnnnnnnnnnnnnnnnnnnnnnnnnnnnnnnnnnnnnnnnnnnnnnnnnnnnnnnnnnnnnnnnnnnnnnnnnnnnnnnnnnnnnnnnnnnnnnnnnnnnnnnnnnnnnnnnnnnnnnnnnnnnnnnnnnnnnnnnnnnnnnnnnnnnnnnnnnnnnnnnnnnnnnnnnnnnnnnnnnnnnnnnnnnnnnnnnnnnnnnnnnnnnnnnnnnnnnnnnnnnnnnnnnnnnnnnnnnnnnnnnnnnnnnnnnnnnnnnnnnnnnnnnnnnnnnnnnnnnnnnnnnnnnnnnnnnnnnnnnnnnnnnnnnnnnnnnnnnnnnnnnnnnnnnnnnnnnnnnnnnnnnnnnnnnnnnnnnnnnnnnnnnnnnnnnnnnnnnnnnnnnnnnnnnnnnnnnnnnnnnnnnnnnnnnnnnnnnnnnnnnnnnnnnnnnnnnnnnnnnnnnnnnnnnnnnnnnnnnnnnnnnnnnnnnnnnnnnnnnnnnnnnnnnnnnnnnnnnnnnnnnnnnnnnnnnnnnnnnnnnnnnnnnnnnnnnnnnnnnnnnnnnnnnnnnnnnnnnnnnnnnnnnnnnnnnnnnnnnnnnnnnnnnnnnnnnnnnnnnnnnnnnnnnnnnnnnnnnnnnnnnnnnnnnnnnnnnnnnnnnnnnnnnnnnnnnnnnnnnnnnnnnnnnnnnnnnnnnnnnnnnnnnnnnnnnnnnnnnnnnnnnnnnnnnnnnnnnnnnnnnnnnnnnnnnnnnnnnnnnnnnnnnnnnnnnnnnnnnnnnnnnnnnnnnnnnnnnnnnnnnnnnnnnnnnnnnnnnnnnnnnnnnnnnnnnnnnnnnnnnnnnnnnnnnnnnnnnnnnnnnnnnnnnnnnnnnnnnnnnnnnnnnnnnnnnnnnnnnnnnnnnnnnnnnnnnnnnnnnnnnnnnnnnnnnnnnnnnnnnnnnnnnnnnnnnnnnnnnnnnnnnnnnnnnnnnnnnnnnnnnnnnnnnnnnnnnnnnnnnnnnnnnnnnnnnnnnnnnnnnnnnnnnnnnnnnnnnnnnnnnnnnnnnnnnnnnnnnnnnnnnnnnnnnnnnnnnnnnnnnnnnnnnnnnnnnnnnnnnnnnnnnnnnnnnnnnnnnnnnnnnnnnnnnnnnnnnnnnnnnnnnnnnnnnnnnnnnnnnnnnnnnnnnnnnnnnnnnnnnnnnnnnnnnnnnnnnnnnnnnnnnnnnnnnnnnnnnnnnnnnnnnnnnnnnnnnnnnnnnnnnnnnnnnnnnnnnnnnnnnnnnnnnnnnnnnnnnnnnnnnnnnnnnnnnnnnnnnnnnnnnnnnnnnnnnnnnnnnnnnnnnnnnnnnnnnnnnnnnnnnnnnnnnnnnnnnnnnnnnnnnnnnnnnnnnnnnnnnnnnnnnnnnnnnnnnnnnnnnnnnnnnnnnnnnnnnnnnnnnnnnnnnnnnnnnnnnnnnnnnnnnnnnnnnnnnnnnnnnnnnnnnnnnnnnnnnnnnnnnnnnnnnnnnnnnnnnnnnnnnnnnnnnnnnnnnnnnnnnnnnnnnnnnnnnnnnnnnnnnnnnnnnnnnnnnnnnnnnnnnnnnnnnnnnnnnnnnnnnnnnnnnnnnnnnnnnnnnnnnnnnnnnnnnnnnnnnnnnnnnnnnnnnnnnnnnnnnnnnnnnnnnnnnnnnnnnnnnnnnnnnnnnnnnnnnnnnnnnnnnnnnnnnnnnnnnnnnnnnnnnnnnnnnnnnnnnnnnnnnnnnnnnnnnnnnnnnnnnnnnnnnnnnnnnnnnnnnnnnnnnnnnnnnnnnnnnnnnnnnnnnnnnnnnnnnnnnnnnnnnnnnnnnnnnnnnnnnnnnnnnnnnnnnnnnnnnnnnnnnnnnnnnnnnnnnnnnnnnnnnnnnnnnnnnnnnnnnnnnnnnnnnnnnnnnnnnnnnnnnnnnnnnnnnnnnnnnnnnnnnnnnnnnnnnnnnnnnnnnnnnnnnnnnnnnnnnnnnnnnnnnnnnnnnnnnnnnnnnnnnnnnnnnnnnnnnnnnnnnnnnnnnnnnnnnnnnnnnnnnnnnnnnnnnnnnnnnnnnnnnnnnnnnnnnnnnnnnnnnnnnnnnnnnnnnnnnnnnnnnnnnnnnnnnnnnnnnnnnnnnnnnnnnnnnnnnnnnnnnnnnnnnnnnnnnnnnnnnnnnnnnnnnnnnnnnnnnnnnnnnnnnnnnnnnnnnnnnnnnnnnnnnnnnnnnnnnnnnnnnnnnnnnnnnnnnnnnnnnnnnnnnnnnnnnnnnnnnnnnnnnnnnnnnnnnnnnnnnnnnnnnnnnnnnnnnnnnnnnnnnnnnnnnnnnnnnnnnnnnnnnnnnnnnnnnnnnnnnnnnnnnnnnnnnnnnnnnnnnnnnnnnnnnnnnnnnnnnnnnnnnnnnnnnnnnnnnnnnnnnnnnnnnnnnnnnnnnnnnnnnnnnnnnnnnnnnnnnnnnnnnnnnnnnnnnnnnnnnnnnnnnnnnnnnnnnnnnnnnnnnnnnnnnnnnnnnnnnnnnnnnnnnnnnnnnnnnnnnnnnnnnnnnnnnnnnnnnnnnnnnnnnnnnnnnnnnnnnnnnnnnnnnnnnnnnnnnnnnnnnnnnnnnnnnnnnnnnnnnnnnnnnnnnnnnnnnnnnnnnnnnnnnnnnnnnnnnnnnnnnnnnnnnnnnnnnnnnnnnnnnnnnnnnnnnnnnnnnnnnnnnnnnnnnnnnnnnnnnnnnnnnnnnnnnnnnnnnnnnnnnnnnnnnnnnnnnnnnnnnnnnnnnnnnnnnnnnnnnnnnnnnnnnnnnnnnnnnnnnnnnnnnnnnnnnnnnnnnnnnnnnnnnnnnnnnnnnnnnnnnnnnnnnnnnnnnnnnnnnnnnnnnnnnnnnnnnnnnnnnnnnnnnnnnnnnnnnnnnnnnnnnnnnnnnnnnnnnnnnnnnnnnnnnnnnnnnnnnnnnnnnnnnnnnnnnnnnnnnnnnnnnnnnnnnnnnnnnnnnnnnnnnnnnnnnnnnnnnnnnnnnnnnnnnnnnnnnnnnnnnnnnnnnnnnnnnnnnnnnnnnnnnnnnnnnnnnnnnnnnnnnnnnnnnnnnnnnnnnnnnnnnnnnnnnnnnnnnnnnnnnnnnnnnnnnnnnnnnnnnnnnnnnnnnnnnnnnnnnnnnnnnnnnnnnnnnnnnnnnnnnnnnnnnnnnnnnnnnnnnnnnnnnnnnnnnnnnnnnnnnnnnnnnnnnnnnnnnnnnnnnnnnnnnnnnnnnnnnnnnnnnnnnnnnnnnnnnnnnnnnnnnnnnnnnnnnnnnnnnnnnnnnnnnnnnnnnnnnnnnnnnnnnnnnnnnnnnnnnnnnnnnnnnnnnnnnnnnnnnnnnnnnnnnnnnnnnnnnnnnnnnnnnnnnnnnnnnnnnnnnnnnnnnnnnnnnnnnnnnnnnnnnnnnnnnnnnnnnnnnnnnnnnnnnnnnnnnnnnnnnnnnnnnnnnnnnnnnnnnnnnnnnnnnnnnnnnnnnnnnnnnnnnnnnnnnnnnnnnnnnnnnnnnnnnnnnnnnnnnnnnnnnnnnnnnnnnnnnnnnnnnnnnnnnnnnnnnnnnnnnnnnnnnnnnnnnnnnnnnnnnnnnnnnnnnnnnnnnnnnnnnnnnnnnnnnnnnnnnnnnnnnnnnnnnnnnnnnnnnnnnnnnnnnnnnnnnnnnnnnnnnnnnnnnnnnnnnnnnnnnnnnnnnnnnnnnnnnnnnnnnnnnnnnnnnnnnnnnnnnnnnnnnnnnnnnnnnnnnnnnnnnnnnnnnnnnnnnnnnnnnnnnnnnnnnnnnnnnnnnnnnnnnnnnnnnnnnnnnnnnnnnnnnnnnnnnnnnnnnnnnnnnnnnnnnnnnnnnnnnnnnnnnnnnnnnnnnnnnnnnnnnnnnnnnnnnnnnnnnnnnnnnnnnnnnnnnnnnnnnnnnnnnnnnnnnnnnnnnnnnnnnnnnnnnnnnnnnnnnnnnnnnnnnnnnnnnnnnnnnnnnnnnnnnnnnnnnnnnnnnnnnnnnnnnnnnnnnnnnnnnnnnnnnnnnnnnnnnnnnnnnnnnnnnnnnnnnnnnnnnnnnnnnnnnnnnnnnnnnnnnnnnnnnnnnnnnnnnnnnnnnnnnnnnnnnnnnnnnnnnnnnnnnnnnnnnnnnnnnnnnnnnnnnnnnnnnnnnnnnnnnnnnnnnnnnnnnnnnnnnnnnnnnnnnnnnnnnnnnnnnnnnnnnnnnnnnnnnnnnnnnnnnnnnnnnnnnnnnnnnnnnnnnnnnnnnnnnnnnnnnnnnnnnnnnnnnnnnnnnnnnnnnnnnnnnnnnnnnnnnnnnnnnnnnnnnnnnnnnnnnnnnnnnnnnnnnnnnnnnnnnnnnnnnnnnnnnnnnnnnnnnnnnnnnnnnnnnnnnnnnnnnnnnnnnnnnnnnnnnnnnnnnnnnnnnnnnnnnnnnnnnnnnnnnnnnnnnnnnnnnnnnnnnnnnnnnnnnnnnnnnnnnnnnnnnnnnnnnnnnnnnnnnnnnnnnnnnnnnnnnnnnnnnnnnnnnnnnnnnnnnnnnnnnnnnnnnnnnnnnnnnnnnnnnnnnnnnnnnnnnnnnnnnnnnnnnnnnnnnnnnnnnnnnnnnnnnnnnnnnnnnnnnnnnnnnnnnnnnnnnnnnnnnnnnnnnnnnnnnnnnnnnnnnnnnnnnnnnnnnnnnnnnnnnnnnnnnnnnnnnnnnnnnnnnnnnnnnnnnnnnnnnnnnnnnnnnnnnnnnnnnnnnnnnnnnnnnnnnnnnnnnnnnnnnnnnnnnnnnnnnnnnnnnnnnnnnnnnnnnnnnnnnnnnnnnnnnnnnnnnnnnnnnnnnnnnnnnnnnnnnnnnnnnnnnnnnnnnnnnnnnnnnnnnnnnnnnnnnnnnnnnnnnnnnnnnnnnnnnnnnnnnnnnnnnnnnnnnnnnnnnnnnnnnnnnnnnnnnnnnnnnnnnnnnnnnnnnnnnnnnnnnnnnnnnnnnnnnnnnnnnnnnnnnnnnnnnnnnnnnnnnnnnnnnnnnnnnnnnnnnnnnnnnnnnnnnnnnnnnnnnnnnnnnnnnnnnnnnnnnnnnnnnnnnnnnnnnnnnnnnnnnnnnnnnnnnnnnnnnnnnnnnnnnnnnnnnnnnnnnnnnnnnnnnnnnnnnnnnnnnnnnnnnnnnnnnnnnnnnnnnnnnnnnnnnnnnnnnnnnnnnnnnnnnnnnnnnnnnnnnnnnnnnnnnnnnnnnnnnnnnnnnnnnnnnnnnnnnnnnnnnnnnnnnnnnnnnnnnnnnnnnnnnnnnnnnnnnnnnnnnnnnnnnnnnnnnnnnnnnnnnnnnnnnnnnnnnnnnnnnnnnnnnnnnnnnnnnnnnnnnnnnnnnnnnnnnnnnnnnnnnnnnnnnnnnnnnnnnnnnnnnnnnnnnnnnnnnnnnnnnnnnnnnnnnnnnnnnnnnnnnnnnnnnnnnnnnnnnnnnnnnnnnnnnnnnnnnnnnnnnnnnnnnnnnnnnnnnnnnnnnnnnnnnnnnnnnnnnnnnnnnnnnnnnnnnnnnnnnnnnnnnnnnnnnnnnnnnnnnnnnnnnnnnnnnnnnnnnnnnnnnnnnnnnnnnnnnnnnnnnnnnnnnnnnnnnnnnnnnnnnnnnnnnnnnnnnnnnnnnnnnnnnnnnnnnnnnnnnnnnnnnnnnnnnnnnnnnnnnnnnnnnnnnnnnnnnnnnnnnnnnnnnnnnnnnnnnnnnnnnnnnnnnnnnnnnnnnnnnnnnnnnnnnnnnnnnnnnnnnnnnnnnnnnnnnnnnnnnnnnnnnnnnnnnnnnnnnnnnnnnnnnnnnnnnnnnnnnnnnnnnnnnnnnnnnnnnnnnnnnnnnnnnnnnnnnnnnnnnnnnnnnnnnnnnnnnnnnnnnnnnnnnnnnnnnnnnnnnnnnnnnnnnnnnnnnnnnnnnnnnnnnnnnnnnnnnnnnnnnnnnnnnnnnnnnnnnnnnnnnnnnnnnnnnnnnnnnnnnnnnnnnnnnnnnnnnnnnnnnnnnnnnnnnnnnnnnnnnnnnnnnnnnnnnnnnnnnnnnnnnnnnnnnnnnnnnnnnnnnnnnnnnnnnnnnnnnnnnnnnnnnnnnnnnnnnnnnnnnnnnnnnnnnnnnnnnnnnnnnnnnnnnnnnnnnnnnnnnnnnnnnnnnnnnnnnnnnnnnnnnnnnnnnnnnnnnnnnnnnnnnnnnnnnnnnnnnnnnnnnnnnnnnnnnnnnnnnnnnnnnnnnnnnnnnnnnnnnnnnnnnnnnnnnnnnnnnnnnnnnnnnnnnnnnnnnnnnnnnnnnnnnnnnnnnnnnnnnnnnnnnnnnnnnnnnnnnnnnnnnnnnnnnnnnnnnnnnnnnnnnnnnnnnnnnnnnnnnnnnnnnnnnnnnnnnnnnnnnnnnnnnnnnnnnnnnnnnnnnnnnnnnnnnnnnnnnnnnnnnnnnnnnnnnnnnnnnnnnnnnnnnnnnnnnnnnnnnnnnnnnnnnnnnnnnnnnnnnnnnnnnnnnnnnnnnnnnnnnnnnnnnnnnnnnnnnnnnnnnnnnnnnnnnnnnnnnnnnnnnnnnnnnnnnnnnnnnnnnnnnnnnnnnnnnnnnnnnnnnnnnnnnnnnnnnnnnnnnnnnnnnnnnnnnnnnnnnnnnnnnnnnnnnnnnnnnnnnnnnnnnnnnnnnnnnnnnnnnnnnnnnnnnnnnnnnnnnnnnnnnnnnnnnnnnnnnnnnnnnnnnnnnnnnnnnnnnnnnnnnnnnnnnnnnnnnnnnnnnnnnnnnnnnnnnnnnnnnnnnnnnnnnnnnnnnnnnnnnnnnnnnnnnnnnnnnnnnnnnnnnnnnnnnnnnnnnnnnnnnnnnnnnnnnnnnnnnnnnnnnnnnnnnnnnnnnnnnnnnnnnnnnnnnnnnnnnnnnnnnnnnnnnnnnnnnnnnnnnnnnnnnnnnnnnnnnnnnnnnnnnnnnnnnnnnnnnnnnnnnnnnnnnnnnnnnnnnnnnnnnnnnnnnnnnnnnnnnnnnnnnnnnnnnnnnnnnnnnnnnnnnnnnnnnnnnnnnnnnnnnnnnnnnnnnnnnnnnnnnnnnnnnnnnnnnnnnnnnnnnnnnnnnnnnnnnnnnnnnnnnnnnnnnnnnnnnnnnnnnnnnnnnnnnnnnnnnnnnnnnnnnnnnnnnnnnnnnnnnnnnnnnnnnnnnnnnnnnnnnnnnnnnnnnnnnnnnnnnnnnnnnnnnnnnnnnnnnnnnnnnnnnnnnnnnnnnnnnnnnnnnnnnnnnnnnnnnnnnnnnnnnnnnnnnnnnnnnnnnnnnnnnnnnnnnnnnnnnnnnnnnnnnnnnnnnnnnnnnnnnnnnnnnnnnnnnnnnnnnnnnnnnnnnnnnnnnnnnnnnnnnnnnnnnnnnnnnnnnnnnnnnnnnnnnnnnnnnnnnnnnnnnnnnnnnnnnnnnnnnnnnnnnnnnnnnnnnnnnnnnnnnnnnnnnnnnnnnnnnnnnnnnnnnnnnnnnnnnnnnnnnnnnnnnnnnnnnnnnnnnnnnnnnnnnnnnnnnnnnnnnnnnnnnnnnnnnnnnnnnnnnnnnnnnnnnnnnnnnnnnnnnnnnnnnnnnnnnnnnnnnnnnnnnnnnnnnnnnnnnnnnnnnnnnnnnnnnnnnnnnnnnnnnnnnnnnnnnnnnnnnnnnnnnnnnnnnnnnnnnnnnnnnnnnnnnnnnnnnnnnnnnnnnnnnnnnnnnnnnnnnnnnnnnnnnnnnnnnnnnnnnnnnnnnnnnnnnnnnnnnnnnnnnnnnnnnnnnnnnnnnnnnnnnnnnnnnnnnnnnnnnnnnnnnnnnnnnnnnnnnnnnnnnnnnnnnnnnnnnnnnnnnnnnnnnnnnnnnnnnnnnnnnnnnnnnnnnnnnnnnnnnnnnnnnnnnnnnnnnnnnnnnnnnnnnnnnnnnnnnnnnnnnnnnnnnnnnnnnnnnnnnnnnnnnnnnnnnnnnnnnnnnnnnnnnnnnnnnnnnnnnnnnnnnnnnnnnnnnnnnnnnnnnnnnnnnnnnnnnnnnnnnnnnnnnnnnnnnnnnnnnnnnnnnnnnnnnnnnnnnnnnnnnnnnnnnnnnnnnnnnnnnnnnnnnnnnnnnnnnnnnnnnnnnnnnnnnnnnnnnnnnnnnnnnnnnnnnnnnnnnnnnnnnnnnnnnnnnnnnnnnnnnnnnnnnnnnnnnnnnnnnnnnnnnnnnnnnnnnnnnnnnnnnnnnnnnnnnnnnnnnnnnnnnnnnnnnnnnnnnnnnnnnnnnnnnnnnnnnnnnnnnnnnnnnnnnnnnnnnnnnnnnnnnnnnnnnnnnnnnnnnnnnnnnnnnnnnnnnnnnnnnnnnnnnnnnnnnnnnnnnnnnnnnnnnnnnnnnnnnnnnnnnnnnnnnnnnnnnnnnnnnnnnnnnnnnnnnnnnnnnnnnnnnnnnnnnnnnnnnnnnnnnnnnnnnnnnnnnnnnnnnnnnnnnnnnnnnnnnnnnnnnnnnnnnnnnnnnnnnnnnnnnnnnnnnnnnnnnnnnnnnnnnnnnnnnnnnnnnnnnnnnnnnnnnnnnnnnnnnnnnnnnnnnnnnnnnnnnnnnnnnnnnnnnnnnnnnnnnnnnnnnnnnnnnnnnnnnnnnnnnnnnnnnnnnnnnnnnnnnnnnnnnnnnnnnnnnnnnnnnnnnnnnnnnnnnnnnnnnnnnnnnnnnnnnnnnnnnnnnnnnnnnnnnnnnnnnnnnnnnnnnnnnnnnnnnnnnnnnnnnnnnnnnnnnnnnnnnnnnnnnnnnnnnnnnnnnnnnnnnnnnnnnnnnnnnnnnnnnnnnnnnnnnnnnnnnnnnnnnnnnnnnnnnnnnnnnnnnnnnnnnnnnnnnnnnnnnnnnnnnnnnnnnnnnnnnnnnnnnnnnnnnnnnnnnnnnnnnnnnnnnnnnnnnnnnnnnnnnnnnnnnnnnnnnnnnnnnnnnnnnnnnnnnnnnnnnnnnnnnnnnnnnnnnnnnnnnnnnnnnnnnnnnnnnnnnnnnnnnnnnnnnnnnnnnnnnnnnnnnnnnnnnnnnnnnnnnnnnnnnnnnnnnnnnnnnnnnnnnnnnnnnnnnnnnnnnnnnnnnnnnnnnnnnnnnnnnnnnnnnnnnnnnnnnnnnnnnnnnnnnnnnnnnnnnnnnnnnnnnnnnnnnnnnnnnnnnnnnnnnnnnnnnnnnnnnnnnnnnnnnnnnnnnnnnnnnnnnnnnnnnnnnnnnnnnnnnnnnnnnnnnnnnnnnnnnnnnnnnnnnnnnnnnnnnnnnnnnnnnnnnnnnnnnnnnnnnnnnnnnnnnnnnnnnnnnnnnnnnnnnnnnnnnnnnnnnnnnnnnnnnnnnnnnnnnnnnnnnnnnnnnnnnnnnnnnnnnnnnnnnnnnnnnnnnnnnnnnnnnnnnnnnnnnnnnnnnnnnnnnnnnnnnnnnnnnnnnnnnnnnnnnnnnnnnnnnnnnnnnnnnnnnnnnnnnnnnnnnnnnnnnnnnnnnnnnnnnnnnnnnnnnnnnnnnnnnnnnnnnnnnnnnnnnnnnnnnnnnnnnnnnnnnnnnnnnnnnnnnnnnnnnnnnnnnnnnnnnnnnnnnnnnnnnnnnnnnnnnnnnnnnnnnnnnnnnnnnnnnnnnnnnnnnnnnnnnnnnnnnnnnnnnnnnnnnnnnnnnnnnnnnnnnnnnnnnnnnnnnnnnnnnnnnnnnnnnnnnnnnnnnnnnnnnnnnnnnnnnnnnnnnnnnnnnnnnnnnnnnnnnnnnnnnnnnnnnnnnnnnnnnnnnnnnnnnnnnnnnnnnnnnnnnnnnnnnnnnnnnnnnnnnnnnnnnnnnnnnnnnnnnnnnnnnnnnnnnnnnnnnnnnnnnnnnnnnnnnnnnnnnnnnnnnnnnnnnnnnnnnnnnnnnnnnnnnnnnnnnnnnnnnnnnnnnnnnnnnnnnnnnnnnnnnnnnnnnnnnnnnnnnnnnnnnnnnnnnnnnnnnnnnnnnnnnnnnnnnnnnnnnnnnnnnnnnnnnnnnnnnnnnnnnnnnnnnnnnnnnnnnnnnnnnnnnnnnnnnnnnnnnnnnnnnnnnnnnnnnnnnnnnnnnnnnnnnnnnnnnnnnnnnnnnnnnnnnnnnnnnnnnnnnnnnnnnnnnnnnnnnnnnnnnnnnnnnnnnnnnnnnnnnnnnnnnnnnnnnnnnnnnnnnnnnnnnnnnnnnnnnnnnnnnnnnnnnnnnnnnnnnnnnnnnnnnnnnnnnnnnnnnnnnnnnnnnnnnnnnnnnnnnnnnnnnnnnnnnnnnnnnnnnnnnnnnnnnnnnnnnnnnnnnnnnnnnnnnnnnnnnnnnnnnnnnnnnnnnnnnnnnnnnnnnnnnnnnnnnnnnnnnnnnnnnnnnnnnnnnnnnnnnnnnnnnnnnnnnnnnnnnnnnnnnnnnnnnnnnnnnnnnnnnnnnnnnnnnnnnnnnnnnnnnnnnnnnnnnnnnnnnnnnnnnnnnnnnnnnnnnnnnnnnnnnnnnnnnnnnnnnnnnnnnnnnnnnnnnnnnnnnnnnnnnnnnnnnnnnnnnnnnnnnnnnnnnnnnnnnnnnnnnnnnnnnnnnnnnnnnnnnnnnnnnnnnnnnnnnnnnnnnnnnnnnnnnnnnnnnnnnnnnnnnnnnnnnnnnnnnnnnnnnnnnnnnnnnnnnnnnnnnnnnnnnnnnnnnnnnnnnnnnnnnnnnnnnnnnnnnnnnnnnnnnnnnnnnnnnnnnnnnnnnnnnnnnnnnnnnnnnnnnnnnnnnnnnnnnnnnnnnnnnnnnnnnnnnnnnnnnnnnnnnnnnnnnnnnnnnnnnnnnnnnnnnnnnnnnnnnnnnnnnnnnnnnnnnnnnnnnnnnnnnnnnnnnnnnnnnnnnnnnnnnnnnnnnnnnnnnnnnnnnnnnnnnnnnnnnnnnnnnnnnnnnnnnnnnnnnnnnnnnnnnnnnnnnnnnnnnnnnnnnnnnnnnnnnnnnnnnnnnnnnnnnnnnnnnnnnnnnnnnnnnnnnnnnnnnnnnnnnnnnnnnnnnnnnnnnnnnnnnnnnnnnnnnnnnnnnnnnnnnnnnnnnnnnnnnnnnnnnnnnnnnnnnnnnnnnnnnnnnnnnnnnnnnnnnnnnnnnnnnnnnnnnnnnnnnnnnnnnnnnnnnnnnnnnnnnnnnnnnnnnnnnnnnnnnnnnnnnnnnnnnnnnnnnnnnnnnnnnnnnnnnnnnnnnnnnnnnnnnnnnnnnnnnnnnnnnnnnnnnnnnnnnnnnnnnnnnnnccgtcccgtaaacacttagcaagctaagtacttatgggaattgcaaaaataaatgtgaaaaagaccccaccaaaagcagggaaaccagttttcacactgattagaacagaaagggttaatgtattacctgccggttagtccgttgcgtcctggtagtgactacctgggagtccctaattggtgtgtagttggtgtacgggttgaaccaatcggagggtcggaccatgtgagccggtgcagggtttccgagggcggttccctacatgggtgtggccctgtcggccgcaatgggcctggttgccgtctagcggcggccggagcgcgacggagtccccccggtctccgtcacccgactgcccctggtgtcttggctggggcgctgtgcgtgctggcgggcgcggtgctggctgcaatgcaggttccagatgcgacggctggactgtatgcacgcggcagatagctgccagtccagccgcttcgcatctcgcttgagcagccccaggtgctcggtgtaaaccgagcggttgccaccggcgaccgcaccaagcgagccgtaaacgagcgccgagaggtgcaccttccacccttggcgctcgaggtggcgcttgatgcggtcgtacttggcgcgcttgtgtgcggcgatgcgggccagcgctgagctgtccgggtcctcgcccgcctgctcctcgaacgccacggccannnnnnnnnnnnnnnnnnnnnnnnnnnnnnnnnnnnnnnnnnnnnnnnnnnnnnnnnnnnnnnnnnnnnnnnnnnnnnnnnnnnnnnnnnnnnnnnnnnnnnnnnnnnnnnnnnnnnnnnnnnnnnnnnnnnnnnnnnnnnnnnnnnnnnnnnnnnnnnnnnnnnnnnnnnnnnnnnnnnnnnnnnnnnnnnnnnnnnnnnnnnnnnnnnnnnnnnnnnnnnnnnnnnnnnnnnnnnnnnnnnnnnnnnnnnnnnnnnnnnnnnnnnnnnnnnnnnnnnnnnnnnnnnnnnnnnnnnnnnnnnnnnnnnnnnnnnnnnnnnnnnnngactcctgggagtccctaattggtgtgtagttggtgtacgggttgaaccaatcggagggtcggaccatgtgagccggtgcagggtttccgagggcggttccctacatgggtgtggccctgtcggccgcaatgggcctggttgccgtctagcggcggccggagcgcgacggagtccccccggtctccgtcacggctggactgtatgcacgcggcagatagctgccagtccagccgcttcgcatctcgcttgagcagccccaggtgctcggtgtaaaccgagcggttgccaccggcgaccgcaccaagcgagccgtaaacgagcgccgagaggtgcaccttccacccttggcgctcgaggtggcgcttgatgcggtcgtacttggcgcgcttgtgtgcggcgatgcgggccagcgctgagctgtccgggtcctcgcccgcctgctcctcgaacgccacggccaggtcgaccaccgccaccgtcttcttggtgtggttgtacagctggaggtcgggccgtagcgcggggccagcgagcgagggcacggtctggttaacccggagctcaacgcggtcctgccggtcgcccgacgacgacgcgatgagcgcacgctcgatggtcttgagtgcgtcgtcgtggcggccgcggaccgcatccatggtgcccgggcagtggttgagcacatgcgccagcgtctccacccgggagcagcccggctgcctgcatcggtcgtgggcccggaggcgccggcgcttgagcacactgtgcgtgtcgagctggttcaagcgggcggccaccgcgatgcgatagtcagcttcccacatgcctcgcggccgcgtgaggaagctgctgccgacgccgccgtgcgcgcgtgccgttctgccttggtcgcgcatggccgcccacttggtccagtgtctgtgcttgatgtgcagcttcacgtgccgcaggaccgtgcggtggtcgagccacttgtcgtggtgcggcacgcgaagctgcagcgtggccgcggccgtgccggtgtcggcgcacgccggcgcggtcgcgaactggaggccgagcgtgcggaggtggcgctggacgtcgacccagagcgagccgatgtcgccgttgcggcgctttggcggcgcgtcgggcgacgtcccgagctgcgagttgagcagcagctcgcacagctcctcctcgcggcccgcccacgcttgagtgtccagccggtggcgcgcgtcggcgatctgccggagctgcacgcgcgcgatgcgctggatggcagggtccttggagttcagcatctgccacccatgcgcgacttgcagcgccgcgtgcagttccgtcagcggcagtaggcccagtccgccgcgcgacaccggtgcgtagaagcactgcgctgtggcggaggctggcagtcgcaggagatggcggaggcctcgcgcgaggtgccggtcgaagcccgcaagctgctgctggaaggggcggaggtggcgaagcgcgtactccacccgagggtagaggtacgtcttcaccgccttcaccacctgccacggtgcgaggcccgactggagcagcgctgtcgcgtcatccttcagctgcttgagcgtgggcgcgagctcgacgcggcggcgtgtgtggtcgaagccgtcgccgatccccaggtaggtgtacgaggcgctcatggacagcgcggggatcggcgacccgtccagctccagcttgaggtcgtccgccttgagcacgccgcggcggtcgcgctggatcgacatggcggagcatttgctggggttggccgccatgccggtccagcggaggaagtcggccacgagcgcgtgctgtcgcttgatgccgtcctcggtgccgctgaagatcttgaggtcgtcggcgtacgccgaggcaccggggcagtcatcgcccgacagcggcactcccgtggccggcagtcgtttcagcgcgaagagcagcgggctgatggcagcgttgaagagctgtgggctgagcgggcagccttggaagactcccacccgcagcgagatcggggccgttgtgccgtcggcggcgttcccgacgacgaacgccgcgctctcgtagagccccttgcacatggtgacgtagtcctcggggacgccgagccgcgcgagtgcatcccatagcagcgcgaacggcacgctgccgaacgcgttgcggaagtcgtaccagacttcgtagagctggcggcgcttgcggcgggcctggtcgatgagcgtggccgcgaggaagttgtgctccccgcagccgttgaccgctcggaagcccttctgccccggggcgtggcggtcgttcgcgtccagccaccgtaccagccgccgcgcgaggacccccgtgtagagcttgtagatggcttgctggaggcagatgggcctccagttcgccgggtcctcgcgcgcgcccttcttgtgcagcagccgcaccaccccgagcttccagctctggggcacacgtttcgcctcccagcacttctggaaggcggtggcgagcacgggcaggagctgcgcggcgaagtgctggtacacgtcatagccgacgccatcgaggccggggctggaggtgccgtgggcgtgctgcagctgtgactcgatatcgtcctgtgtcggcgcctccgtgagcagctccctgaacctcgacgcggcaggcaggtgggtcatagcggagcggaaggcagcacccgccggggcgtccggagcgaactcctggctgggtgtgttgacgccgtcgaagtaccgccagagctcatcgcccggaatggggcaggtaccgtcgtctgtggcgcctgccgctggcgccgctgggtccgatgcggtgccggcgctggaggctgctgtccttggcgtctcctgttgcgcgcgtgccttggccaggatgtcttcgacgcaggctttctcgtccgtgtcgaaccggtgacgcaggtgctgttggtcgatggccgagttgacgcggccgacgcggcggcgggctcggcgaacagccgtgcggtctccgggcgaagcctgctccacggcgtggagatcgtccagggcctcgtcgaggcggtgctcgcggtggtgtcgagtcacccgcggcgggcggcggcgacgtcgccgcttcgctgcaccagagcgcccgcggcgcctgcactgcctccgtcgcgccgagtcctgctgactggcgtcgccatcgcgctcgttgtcttcatgtgcatcgccttccaggctgcggcggtcctgcccttggtcgtgcagcgggcgctgccgtcgctgttcgccttgttgccgctgctgtcgctgacgctggggacgcggctcggggcgtcgctgggcctgggagtacggctgcaatttgtcgtacaggaggtgcgggagggctgtgatgtagccctccgccgactcccagtcactggcgtcagtgatcttggccgccagcgtcgcgccaagccgctccaccatctcgcgggcagcgtcgtcctcggcttcggtgagctggcgtagtcggaggcggggtcgacgctgcggaactgcgtccggcccgatgcgcatggctgcatagacctcgccgtcgtcgatgtcggcgagatcctcgtcctccggctcctgcatctcgatgttggtgtcggccgcgggtgtcgggggcggagcgcggggtgtcggctggggcggcagcacgggcatagggtccagcgtcgtgttcgtacagccgtcgcctgccgtgtgagcgccgcactccatcatcgtccggcggaggtcgagggctcggttggccaggcggtcggcatgggcattcgcttggcggtcgatgtggtggagtgagaagctccccacccgcgcgagctctaccttgacttggtcgcggaggcggcgtagaacggcgttcctcgccgcgaagatgccgcgcacctgctggatcacaagggtgctgtcgccttccacccgcagcgacgtcgctccgtggtcggcagcggctctcgacccgagcagcagcgccgagtactcggcagtgttgttcgtttcgctgctgctcggcatgtagtgggagcacgtccacaccacggagccgtcgggcttgaacagcgctgcaccagctccgccgggtcctgggttggcgcggcaggcgccgtcgaagcgcagcagccactctccggcggtgccgctgtccacgtccatcgccgccgctgtcgccgtccggtcgggtgcggccgccgggttgtcctccttggtctcgccggcagccgtcgactctggtgggagcaggcgagcggcgatccgagacgccaccatgcggcgcggcagcggtgggccccagcgaggcgctggaacctcaccgagacgcgcannnnnnnnnnnnnnnnnnnnnnnnnnnnnnnnnnnnnnnnnnnnnnnnnnnnnnnnnnnnnnnnnnnnnnnnnnnnnnnnnnnnnnnnnnnnnnnnnnnnnnnnnnnnnnnnnnnnnnnnnnnnnnnnnnnnnnnnnnnnnnnnnnnnnnnnnnnnnnnnnnnnnnnnnnnnnnnnnnnnnnnnnnnnnnnnnnnnnnnnnnnnnnnnnnnnnnnnnnnnnnnnnnnnnnnnnnnnnnnnnnnnnnnnnnnnnnnnnnnnnnnnnnnnnnnnnnnnnnnnnnnnnnnnnnnnnnnnnnnnnnnnnnnnnnnnnnnnnnnnnnnnnnnnnnnnnnnnnnnnnnnnnnnnnnnnnnnnnnnnnnnnnnnnnnnnnnnnnnnnnnnnnnnnnnnnnnnnnnnnnnnnnnnnnnnnnnnnnnnnnnnnnnnnnnnnnnnnnnnnnnnnnnnccgtcgtcgtcctcgctgctgtcgtcgtccaggtcgctgggcccgtggcggaccgccagggcccgcgccgtagccgctgcgagcgccgccccaggcgctacccaatcgggcagcctgccggccgccctgccgggtcctgccaattcgctggggggtcctgcggcggtgccgcgcgctggaggggctggcggggggtcttgggcagccaaccggcgcgcgtgggggtccgtagcaggcgtgggggctgcgcaggagccgtcgctccgcgcgcctcgccgaagcgccgcatgctcgaggccgtgttcttcggccgtgtactccgtgccgcgcggcgcacgagaggcccgggatcctggcatagtgaggccaggtggacggggcccggtcccgcccggcggacggtccgcgggcccgcgtccgctcgccgtcgccgcgaagcgacgcgaggttgaagcggcggaccgggcctcggcttggccgccagagggcccggcccgcggtcccgcaatgggcgcaatgggcgcagcgggtcgcggacccgtgcccgaagttgcgccggccaactcctcgccggtgccgagcagcggcgccgcgcgtggagggtcgccggggccattttcggctccggccgagcccaaaacgggggcgggcggatccccaatgcgtaaccgaagccctagcggatccgcccccgcccggacgtccgccagctcagccgccccagccccgtcgctggccgcgctatagaaagacgcgtcgctggcgaggctggagtggctggccgtggagcactcgctgtcggtggacggcgagcgctcccggggctgccagtccggccaccagaagcgcatgcgccgatgcggtggtgaagggccgaaaaaggtagttggatagaaaagataagtgtagtagttggcctcacgagggataggtgaaagcccccggagaccgtaccgcgattggctagcaagctaaccgaaagcagcagttccaaaaataaatgtgaaaaagaccccaccaaaagcagggaaaccagttttcacactgattagaacagaatgtgtgttcgtgtttaccagttagtaacctctccgtaactgaaatgtaggctaaaatatgcatgtcactaaagggagggtgtttgtgtcttcctgggtttttgaagggcggttccctacctgggtagtgccctgttggtcaaatgaccagcttaccgctgtgcccgagcctgcgatgtgcgccgcggggcccccccagacccacgcggcgttcgcgaggcgttgccgctccgttgtccttcgcggtggcgccggcagtgccagccccagatgcggtggctggcgcggatgcagtggctcgacagctgaaggtccagctgtcgagcctcgcgcttgtgtagcttcaacttctccgtgtaggtgttgaagttgctgggctgcaccgagcccagcgacccgtacacgatcgccgcggtctgcacctgccaccccttgagttgcagctccgccacgatcggttggtacttgagtgtcttgtggtcgtggctgagctgcagcgaggagtgacgggcgccggccgcgtgctcttcgaacgtgaccgccaagtcggcgatcaccatcttcttggcggccacgttccgtagtactatgtctggccgcagagctgcgcccgtgtactcgggtaccgtctggttcaggcgcagctccgcggtcgactcgccgcgcttgagcgcgttgcggatcttggacccgatctgctccaaggcgtcgtcatgacgctggcggattgcgtccatgttgggctcgcaatggttgaggacatgggccagcgtctcggccgaggagcaggtcgggtccctgcaggtcttgtgcgaccgcagccgcttgcgcttgagcacggcgttcgtgtcgatctggttgaggcgggccttcacgccgaagcggtagtcgtcgtccgacaggcccgccccagtcgacacgaacttggcgccgacaccgccgtgggcccgcaccgtcttaccctggtccgccagacccttccaccgggtctggtggcggatcttgaggtgcaacttgacgtgccgcaacacgctcttgtggtcgagccacttggcgtggtgcggcacgcggaggccgagcgggtccaggccgttgcggtcgtcctgcaccaccaggctgaggtggtagatgcgcagccaccgctgcacgtcggaccacagtgacccgatgtcgccgtggcggcgcagcgcctccgcgtggggcgaggcggcgagctcggagttgaggaagcaccgcacgagctcgtcgtcacgcccccgccagtgttcttcgcggaggcggtgacgcttgcgggccacctggcacacctgtgcgcgcgccacttcccggatcgctgggtccttcgagtgcagcatctgccacgcatgggcgatctgcagcgcgcggtgcatttccaccagcggctggagccccaagcccccgctcgacgttggtgcgtagagcacctcgttggttgccgatcggggcaggcgtagcaggtgccgcaggcccttggctaccacacggtcgaagctctgcagttgggactggagcggacggaggtggcggagcgcgtactcgaccttggggtagacgtaggtcttgagcgccttcaccacctgccacgtcgccaaccccgactgcatcagcgccaccgcctcccgcttgatctgctgtagcttgggctctagctggagacggtggcgcacgtgatcgaagccgtcgcccacgccgaggtagcggtagctgtcgtgcagcttgatgctggagacctcctcgtcgtggagcgacagcttcatgtccttgtcgtgggcggggttgccgcgcgcgttgcgtgtcacggccaggaaggcgcacttgcctgggttggcctgcagccccgtccactccaggaactgctcaacgacagcgtggcagcgcgcgatgccggccgcgctgtcgctgaacaccttgaggtcgtcggcgtaggcggtggtgcatggccgcaccccgtccgccaacgcgacgcccactccgtcgagcttctccaatgctcggagcaacggcaccagcgcggcaatgaacaggagggggctgagcggacagccttggtacacgcccacctcctgccgcactggttccgtcgctccgtcggccgcgttgccgacgacgaaataggagtcctcgtagatgtcgtcgcagcgctcgacgaacgcacgctcgacgccgagcaggcggagcacataccacagcatgtcctggtgaacggacccgaacgcgttccgcaggtcgtaccagacctggtacagcctgcggcgcatgcgtcgggtttggtccaggagcgtggttgccacgaagttgtgctcgtggcaaccattgtacgccctgaaccccttctgcgccatgggcagcagtccgttcgcctccaggtacgtcgacagccgacgcgccagcagaccgctgtagagcttgtagatcgcggtctgcaggcagatcggccgccagttcgctgggtcggtggggtcgcccttcttgtggatgaggcggacgaaccccaccttccacagggcaggcacccggtggtggcgccaacagaactggaaggctgcgtggaggagggggaccagctgcgccgcgaacttcttgtagatgtcgtagcccacgccgtcgtggccggggctggagttcgtggccgcttgcatgagctggtcctccacctcgtccaccgtcagctcgtccgtgagcgcgctccgccgctcctgcggtgtcccgacgtcggccatcgcctcgcggaacaacgccccgcaagcttcatctggtaggaagttgatgcggggcgagttcaccgccgtgaagtgctcgtggagcgtgcccgagtcgatggggcacgtctccgggtgctcctccgctgcggtctccgccgacgcagcacgcagaatgtcctcgacgcacttgctctcgttgcgagcgaagtcgtggcggagctgctgttggcgcatcgaggcgcggatccggccgacgcggcgccgcgcacggcggacggccgatctgctggtgggtcgctcctgctgcaccgctgccatctcgtcgagggcctcgtcgagtcgatgctcgcgctgagtgcgcgtcacccggggcggtcgctgtcgctgctgctgctgctgcagtgtaggccgagggtggggctgggctgctgtgaagggctgcagcacctgccggatgcgaccggggatggcgctgatgtatccatcgcccgaggtccagctgtctgcgtcttcgatcttgcacgctagctcctccgccatggtctgtagggccgacgccgccgcttcctgctcgtcttcggtcagctgccgcagtcgaaggcgcggctgccgcgctggagccgtcccgggcccgataggcagcgtggggaacgcctcgccgccgtcgcgcgcggcaatctctgcgtcgatgtcctcgtcatgatcgctggcaggctcggcgcgcgtgggtgcgcacgcggggcgggcaggaggtgcgggttgctcgcgctggcgttgtgcagcaggattcatgtggaggcagctctccatcgccccttggtgctcgccgcactcggccagcgaacgcttcaggtccagcgcccggtttgccagtctgtccgcgtgcgcgttcgccttccggtcgatgtgcttgagcgttaaggacgtcactgcgcggagggcgtggcggacgcggttgcgcagctggcggaggcgcgggttcctgcaggcgaaggtgcccttgacctgcgctacgacgaggtggctgtccccttcgatctccaggtgcgaggctccgtggtggacggcactctgcacgccaagcagcagcgccgtgtattcagcggtgttgttggtctcgctgctgtttggcatgtagtgcgagcacgtccacgccacggtcccgcacggcttgaacaaggcggcaccagctcccccaggtcccgggttccggcggcaggcgccgtcgaagcggagcacccacggctcgggcatagccggccctccgtcgacgtccatcgcatcgggggctgtcgtcgtggccgcgggggaagcgggcgggtctgggcagcgccgagccgaagcaggccggcgcgtcgctggtgctggtgccgtgggtaggcctgtgagcaggcgagctacagccgctgccccgatcgcgccgtgacgtggaccccaccgtgttgcaccggtgaccggtgcagcggagcccagtggccggtgcgctgccgggttagcagcgtgctcgtcgttcacagcctgggcagtgtcgttcgtgccaggtcttgggccccagcgcgttgctcgtctcgctggaggtggcggcgtctgcgccgtggacgctgccgtcgtcatcgtctccttctccttgatcgctgtcgtctccgtctcctcaggcgctgtcgtcgctgtcgtcgttgtcgccgttgcagctgtcaccgtcgggggcggtgtcgtcgtctccatcgcgtccgcggtcgacggcggcggcgccatctcgatgtcaggtgctggctccacctcggcggggtggcgggccagcacgggcggcagcggcgtcgccgtctctgtcgctgtcgtcgccgccttcgaggttgccgtcgtcatcatcgccgtctccgtggttgccggcgttgcctgtgccttggtcgccgacgtcggctgcggtgccggtgccgtctcgacgtccgggtgtggcgtcccgtcggcgggatggcggtccagcatgggcgggcccaccgccgtcgtcgtctccgctggtggcggcgtcgtcttcccgttcggcggtccctgcagcgtcgcgggcgtccgtgtggagaaggtggcggcgctggcggtcgggttgagtcggcgccgcttgcctgtaacctgctgcaccaggcgagatcgggtgggggtcagcacggggggggacatgctggcgcccaggggtcttgggagcggcgggcacagcgctctgcagggtggcggtgtctgccaccgcagtgccgcgtggtgcggctgctgcagtgccgcgtggtgcggctgctgcagcggcagtccttgctgcggcggggctgctggtgggggtcgcagcagccccgatccgcgtcggggggtcaacaggtgtcgggggtggcaccgctgcttccgaagcttgggccgtcgcggaggtggcggccgcggctggagggttgcgctgggtacacgcttgggcgtggcatgcagccacgatccgcgagaagaagatgagcgagcatcggcacccgctggagaagacgtcctggaagcgggtgccgtggtgtgctgctcggcggtgcgccaccagcgtcgcgaggttcggggcgacgtacgcgcacaacgcgcactcgaactgggcagcgtcgtgcgcgtacgtcgcctgcaccgtgccctgctggccgtcgtccggtccaaagtgctggggctgggtcctcggtgctgcttgcacggccgcgagtttagccgccgtggcatcgctctcctccgtcttggcctcttggtcacctccgtcgtggccatggttcttgcagcgtctgctccggcggagcgcgtcgcctgtcatgggctccacgcgcgcgcgtggctgatagtagcgtgctgggttcggcgtagcgcgcgcgcggtgccccacggtggcgcgcacaacaggagttgctgcatcttggacagctgcggctgcggctgttcctacgtcggcggcagccgcagccgcagctgggcttggtgttgggggcgcctgggttccaccctcggcgagcatgccgcccgctctgccgggtcggggcaacacactgctggggtcttgggggccgctgccggcggcgacagggccggcggggccgtcgtcgtcctcgctgctgtcgtcgtccaggtcgctgggcccgtggcggaccgccagggcccgcgcagtggcggctgcgagcgccgccccgggcgctaccggatcgggcagcctgccggccgccctgccgggtcctgccaactcactggggggtcctgcggcggcgccgcgcgctggaggggcggagcggggggtcttgggcagccaaccggcgcgcgtgggggtccgtagcaggcgtgggggctgcgcaggagccgtcgctccgcgcgcctcgccgaagcgccgcgtcctcgaggccgtgttcttcggccgtggcgaccgtgccgcgcggcgcacgagaggcccgggatcctggcatagtggggccaagtggacggggcccggtcccgcccggcggacggtccgcgggcccgcgtccgctcgccgtcgccgcgaagcgacgcgaggttgaagcggcggaccgggcctcggcttggccgccagagggcccggcccgcggtcccgcaatgggcgcaatgggcgcagcgggtcgcggacccgtgcccgaagttgcgccggccaactcctcgccggtgccgagcagcggcgccgcgcgtggagggtcgccggggccattttcggctctggccgagcccaaaacgggggcgggcggatccccaatgcgtaaccgaagccctagcggatccgcccccgcccggacgtccgccagctcagccgccccagccccgtcgctggccgcgctatagaaagacgcgtcgctggcgaggctggagtggctggccttggagcactcgctgtcggtggacggcgagcgctcccggggctgccagtccggccaccagaagcgcatgcgccgatgcggtggtgaagggccgaaaaggtagttggatagaaaagataagtgtagtagttggcctcacgagggataggtgaaagcccccggagaccgtcccgtaaacacttagcaagctaagtacttatgggaattgcaaaaataaatgtgaaaaagaccccaccaaaagcagggaaaccagttttcacactgattagaacagaatgtgtgttcgtgtttaccagttagtaacctctccgtaactgaaatgtaggctaaaatatgcatgtcactaaagggagggtgtttgtgtcttcctgggtttttgaagggcggttccctacctgggtagtgccctgttggtcaaatgaccagcttaccgctgtgcccgagcctgcgatgtgcgccgcggggcccccccagacccacgcggcgttcgcgaggcgttgccgctccgttgtccttcgcggtggcgccggcagtgccagccccagatgcggtggctggcgcggatgcagtggctcgacagctgaaggtccagctgtcgagcctcgcgcttgtgtagcttcaacttctccgtgtaggtgttgaagttgctgggctgcaccgagcccagcgacccgtacacgatcgccgcggtctgcacctgccaccccttgagttgcagctccgccacgatcggttggtacttgagtgtcttgtggtcgtggctgnnnnnnnnnnnnnnnnnnnnnnnnnnnnnnnnnnnnnnnnnnnnnnnnnnnnnnnnnnnnnnnnnnnnnnnnnnnnnnnnnnnnnnnnnnnnnnnnnnnnnnnnnnnnnnnnnnnnnnnnnnnnnnnnnnnnnnnnnnnnnnnnnnnnnnnnnnnnnnnnnnnnnnnnnnnnnnnnnnnnnnnnnnnnnnnnnnnnnnnnnnnnnnnnnnnnnnnnnnnnnnnnnnnnnnnnnnnnnnnnnnnnnnnnnnnnnnnnnncagccgccccagccccgtcgctggccgcgctatagaaagacgcgtcgctggcgaggctggagtggctggccgtggagcactcgctgtcggtggacggcgagcgctcccggggctgccagtccggccaccagaagcgcatgcgccgatgcggtggtgaagggccgaaaaggtagttggatagaaaagataagtgtagtagttggcctcacgagggatgggtgaaagcccccggagaccgtaccgcgattggctagcaagctaaccgaaagcagcagttccaaaaataaatgtgaaaaagaccccaccaaaagcagggaaaccagttttcacactgattagaacagaaagggttaatgtattacctgccggttagtccgttgcgtcctggtagtgactacctgggagtccctaattggtgtgtagttggtgtacgggttgaaccaatcggagggtcggaccatgtgagccggtgcagggtttccgagggcggttccctacatgggtgtggccctgtcggccgcaatgggcctggttgccgtctagcggcggccggagcgcgacggagtccccccggtctccgtcacccgactgcccctggtgtcttggctggggcgctgtgcgtgctggcgggcgcggtgctggctgcaatgcaggttccagatgcgacggctggactgtatgcacgcggcagatagctgccagtccagccgcttcgcatctcgcttgagcagccccaggtgctcggtgtaaaccgagcggttgccaccggcgaccgcaccaagcgagccgtaaacgagcgccgagaggtgcaccttccacccttggcgctcgaggtggcgcttgatgcggtcgtacttggcgcgcttgtgtgcggcgatgcgggccagcgctgagctgtccgggtcctcgcccgcctgctcctcgaacgccacggccaggtcgaccaccgccaccgtcttcttggtgtggttgtacagctggaggtcgggccgtagcgcggggccagcgagcgagggcacggtctggttaacccggagctcaacgcggtcctgccggtcgcccgacgacgacgcgatgagcgcacgctcgatggtcttgagtgcgtcgtcgtggcggccgcggaccgcatccatggtgcccgggcagtggttgagcacatgcgccagcgtctccacccgggagcagcccggctgcctgcatcggtcgtgggcccggaggcgtcggcgcttgagcacactgtgcgtgtcgagctggttcaagcgggcggccaccgcgaagcggtagtcagcttcccacatgcctcgcggccgcgtgaggaagctgctgccgacgccgccgtgcgcgcgtgccgttctgccttggtcgcgcatggccgcccacttggtccagtgtctgtgcttgatgtgcagcttcacgtgccgcaggaccgtgcggtggtcgagccacttgtcgtggtgcggcacgcgaagctgcagcgtggccgcggccgtgccggtgtcggcgcacgccggcgcggtcgcgaactggaggccgagcgtgcggaggtggcgctggacgtcgacccagagcgagccgatgtcgccgttgcggcgctttggcggcgcgtcgggcgacgtcccgagctgcgagttgagcagcagctcgcacagctcctcctctcggcccgcccacgcttgagtgtccagccggtggcgcgcgtcggcgatctgccggagctgcacgcgcgcgatgcgctggatggcagggtccttggagttcagcatctgccacccaagcgcgacttgcagcgccgcgtgcagttccgtcagcggcagtaggcccagtccgccgcgcgacaccggtgcgtagaagcactgcgctgtggcggaggctggcagtcgcaggagatggcggaggcctcgcgcgaggtgccggtcgaagcccgcaagctgctgctggaaggggcggaggtggcgaagcgcgtactccacccgagggtagaggtacgtcttcaccgccttcaccacctgccacggtgcgaggcccgactggagcagcgctgtcgcgtcatccttcagctgcttgagcgtgggcgcgagctcgacgcggcggcgtgtgtggtcgaagccgtcgccgacccccaggtaggtgtacgaggcgctcatggacagcgcggggatcggcgacccgtccagctccagcttgaggtcgtccgccttgagcacgccgcggcggtcgcgctggatcgacatggcggagcatttgctggggttggccgccatgccggtccagcggaggaagtcggccacgagcgcgtgctgtcgcttgatgccgtcctcggtgccgctgaagatcttgaggtcgtcggcgtacgccgaggcaccggggcagtcatcgcccgacagcggcactcccgtggccggcagtcgcttcagcgcgaagagcagcgggctgatggcagcgttgaagagctgtgggctgagcgggcagccttggaagactcccacccgcagcgagatcggggccgttgtgccgtcggcggcgttcccgacgacgaacgccgcgctctcgtagagccccttgcacatggtgacgtagtcctcggggacgccgagccgcgcgagtgcatcccatagcagcgcgaacggcacgctgccgaacgcgttgcggaagtcgtaccagacttcgtagagctggcggcgcttgcggcgcttgcggcgggcctggtcgacgagcgtggccgcgaggaagttgtgctccccgcagccgttgaccgctcggaagcccttctgccccggggcgtggcggtcgttcgcgtccagccaccgtaccagccgccgcgcgaggacccccgtgtagagcttgtagatggcttgctggaggcaaatgggcctccagttcgccgggtcctcgcgcgcgcccttcttgtgcagcagccgcaccaccccgagcttccagctctggggcacacgtttcgcctcccagcacttctggaaggcggtggcgagcacgggcaggagctgcgcggcgaagtgctggtacacgtcatagccgacgccatcgaggccggggctggaggtgccgtgggcgtgctgcagctgtgactcgatatcgtcctgtgtcggcgcctccgtgagcagctccctgaacctcgacgcggcaggcaggtgggtcatagcggagcggaaggcagcacccgccggggcgtccggagcgaactcctggctgggtgtgttgacgccgtcgaagtaccgccagagctcatcgcccggaatggggcaggtaccgtcgtctgtggcgcctgccgctggcgccgctaggtccgatgcggtgccggcgctggaggccgctgtccttggcgtctcctgctgcgcgcgtgccttggccaggatgtcttcgacgcaggctttctcgtccgtgtcgaaccggtgacgcaggtgctgttggtcgatggccgagttgacgcggccgacgcggcggcgggctcggcgaacagccgtgcggtctccgggcgaagcctgctccacggcgtggaggtcgtccaaggcctcgtcgaggcggtgctcgcggtggtgtcgagtcacccgcggcgggcggcggcgacgtcgccgcttcgctgcaccagagcgcccgcggcgcctgcactgcctccgtcgcgccgagtcctgctgactggcgtcgccatcgcgctcgttgtctccatgtgcatcgccttccaggctgcggcggtcctgcccttggtcgtgcagcgggcgctgccgtcgctgttcgccttgttgccgctgctgccgcgggcactggctgccttggtgctgctgtcgctgacgctggggacgcggctcggggcgtcgctgggcctgggagtacggctgcaatttgtcgtacaggaggtgcgggagggctgtgatgtagccctccgccgactcccagtcactggcgtcagtgatcttggccgccagcgtcgcgccaagccgctccaccatctcgcgggcagcgtcgtcctcggcttcggtgagctggcgtagtcggaggcggggtcgacgctgcggaactgcgtccggcccgatgcgcatggctgcatagacctcgccgtcgtcgatgtcggcgagatcctcgtcctccggctcctgcatctcgatgttggtgtcggccgcgggtgtcgggggcggagcgcggggtgtcggctggggcggcagcacgggcataggggccagcgtcgtgttcgtacagccgtcgcctgccgtgtgagcgccgcactccatcatcgtccggcggaggtcgagggctcgattggccaggcggtcggcatgggcattcgcttggcggtcgatgtggtggagtgagaagctccccacccgcgcgagctctaccttgacgtggtcgcggaggcggcgtagaacggcgttcctcgccgcgaagatgccgcgcacctgctggatcacaagggtgctgtcgccttccacccgcagcgacgtcgctccgtggtcggcagcggctctcgacccgagcagcagcgccgagtactcggcagtgttgttcgtttcgctgctgctcggcatgtagtgggagcacgtccacaccacggagccgtcgggcttgaacagcgctgcaccagctccgccgggtcctgggttggcgcggcaggcgccgtcgaagcgcagcagccactctccggcggtgccgctgtccacgtccatcgccgccgctgtcgccgtccggtcgggtgcggccgccgggttgtcctccttggtctcgccggcagccgtcggctctggtgggagcaggcgagcggcgatccgagacgccaccatgcggcgcggcagcggtgggccccagcgaggcgctggaacctcaccgagacgccaccatgcgggtggccaccagctctcggggcagcggaggttcccagcgtggtgctggaatggcaccaaggcgcgcggcgacacggtcagcgaccagagctcgaggtagcgctggcccccatcgtccatggctcggctgctcctgcacttcaacaacttcaacttcgggatgagtggggctcgcaagcgggggggacgctgcgagctccggggttgctggttggggcgagtcgggcgtgacagtggccgccgcgacggtggcgttggctgcggcagcggtggggcttgatgtccctgccactggcggagccgtagccggaagtgcagtcgaacggccggcgcacgcttgcgcgtgtttagctgccgctggccgcgacgcaaagggggtgccgcacgcgcagcccgccagaaacttgtcctggaagactgcgcgccggtgccgagtggtccgatgcctctnnnnnnnnnnnnnnnnnnnnnnnnnnnnnnnnnnnnnnnnnnnnnnnnnnnnnnnnnnnnnnnnnnnnnnnnnnnnnnnnnnnnnnnnnnnnnnnnnnnnnnnnnnnnnnnnnnnnnnnnnnnnnnnnnnnnnnnnnnnnnnnnnnnnnnnnnnnnnnnnnnnnnnnnnnnnnnnnnnnnnnnnnnnnnnnnnnnnnnnnnnnnnnnnnnnnnnnnnnnnnnnnnnnnnnnnnnnnnnnnnnnnnnnnnnnnnnnnnnnnnnnnnnnnnnnnnnnnnnnnnnnnnnnnnnnnnnnnnnnnnnnnnnnnnnnnnnnnnnnnnnnnnnnnnnnnnnnnnnnnnnnnnnnnnnnnnnnnnnnnnnnnnnnnnnnnnnnnnnnnnnnnnnnnnnnnnnnnnnnnnnnnnnnnnnnnnnnnnnnnnnnnnnnnnnnnnnnnnnnnnnnnnnnnnnnnnnnnnnnnnnnnnnnnnnnnnnnnnnnnnnnnnnnnnnnnnnnnnnnnnnnnnnnnnnnnnnnnnnnnnnnnnnnnnnnnnnnnnnnnnnnnnnnnnnnnnnnnnnnnnnnnnnnnnnnnnnnnnnnnnnnnnnnnnnnnnnnnnnnnnnnnnnnnnnnnnnnnnnnnnnnnnnnnnnnnnnnnnnnnnnnnnnnnnnnnnnnnnnnnnnnnnnnnnnnnnnnnnnnnnnnnnnnnnnnnnnnnnnnnnnnnnnnnnnnnnnnnnnnnnnnnnnnnnnnnnnnnnnnnnnnnnnnnnnnnnnnnnnnnnnnnnnnnnnnnnnnnnnnnnnnnnnnnnnnnnnnnnnnnnnnnnnnnnnnnnnnnnnnnnnnnnnnnnnnnnnnnnnnnnnnnnnnnnnnnnnnnnnnnnnnnnnnnnnnnnnnnnnnnnnnnnnnnnnnnnnnnnnnnnnnnnnnnnnnnnnnnnnnnnnnnnnnnnnnnnnnnnnnnnnnnnnnnnnnnnnnnnnnnnnnnnnnnnnnnnnnnnnnnnnnnnnnnnnnnnnnnnnnnnnnnnnnnnnnnnnnnnnnnnnnnnnnnnnnnnnnnnnnnnnnnnnnnnnnnnnnnnnnnnnnnnnnnnnnnnnnnnnnnnnnnnnnnnnnnnnnnnnnnnnnnnnnnnnnnnnnnnnnnnnnnnnnnnnnnnnnnnnnnnnnnnnnnnnnnnnnnnnnnnnnnnnnnnnnnnnnnnnnnnnnnnnnnnnnnnnnnnnnnnnnnnnnnnnnnnnnnnnnnnnnnnnnnnnnnnnnnnnnnnnnnnnnnnnnnnnnnnnnnnnnnnnnnnnnnnnnnnnnnnnnnnnnnnnnnnnnnnnnnnnnnnnnnnnnnnnnnnnnnnnnnnnnnnnnnnnnnnnnnnnnnnnnnnnnnnnnnnnnnnnnnnnnnnnnnnnnnnnnnnnnnnnnnnnnnnnnnnnnnnnnnnnnnnnnnnnnnnnnnnnnnnnnnnnnnnnnnnnnnnnnnnnnnnnnnnnnnnnnnnnnnnnnnnnnnnnnnnnnnnnnnnnnnnnnnnnnnnnnnnnnnnnnnnnnnnnnnnnnnnnnnnnnnnnnnnnnnnnnnnnnnnnnnnnnnnnnnnnnnnnnnnnnnnnnnnnnnnnnnnnnnnnnnnnnnnnnnnnnnnnnnnnnnnnnnnnnnnnnnnnnnnnnnnnnnnnnnnnnnnnnnnnnnnnnnnnnnnnnnnnnnnnnnnnnnnnnnnnnnnnnnnnnnnnnnnnnnnnnnnnnnnnnnnnnnnnnnnnnnnnnnnnnnnnnnnnnnnnnnnnnnnnnnnnnnnnnnnnnnnnnnnnnnnnnnnnnnnnnnnnnnnnnnnnnnnnnnnnnnnnnnnnnnnnnnnnnnnnnnnnnnnnnnnnnnnnnnnnnnnnnnnnnnnnnnnnnnnnnnnnnnnnnnnnnnnnnnnnnnnnnnnnnnnnnnnnnnnnnnnnnnnnnnnnnnnnnnnnnnnnnnnnnnnnnnnnnnnnnnnnnnnnnnnnnnnnnnnnnnnnnnnnnnnnnnnnnnnnnnnnnnnnnnnnnnnnnnnnnnnnnnnnnnnnnnnnnnnnnnnnnnnnnnnnnnnnnnnnnnnnnnnnnnnnnnnnnnnnnnnnnnnnnnnnnnnnnnnnnnnnnnnnnnnnnnnnnnnnnnnnnnnnnnnnnnnnnnnnnnnnnnnnnnnnnnnnnnnnnnnnnnnnnnnnnnnnnnnnnnnnnnnnnnnnnnnnnnnnnnnnnnnnnnnnnnnnnnnnnnnnnnnnnnnnnnnnnnnnnnnnnnnnnnnnnnnnnnnnnnnnnnnnnnnnnnnnnnnnnnnnnnnnnnnnnnnnnnnnnnnnnnnnnnnnnnnnnnnnnnnnnnnnnnnnnnnnnnnnnnnnnnnnnnnnnnnnnnnnnnnnnnnnnnnnnnnnnnnnnnnnnnnnnnnnnnnnnnnnnnnnnnnnnnnnnnnnnnnnnnnnnnnnnnnnnnnnnnnnnnnnnnnnnnnnnnnnnnnnnnnnnnnnnnnnnnnnnnnnnnnnnnnnnnnnnnnnnnnnnnnnnnnnnnnnnnnnnnnnnnnnnnnnnnnnnnnnnnnnnnnnnnnnnnnnnnnnnnnnnnnnnnnnnnnnnnnnnnnnnnnnnnnnnnnnnnnnnnnnnnnnnnnnnnnnnnnnnnnnnnnnnnnnnnnnnnnnnnnnnnnnnnnnnnnnnnnnnnnnnnnnnnnnnnnnnnnnnnnnnnnnnnnnnnnnnnnnnnnnnnnnnnnnnnnnnnnnnnnnnnnnnnnnnnnnnnnnnnnnnnnnnnnnnnnnnnnnnnnnnnnnnnnnnnnnnnnnnnnnnnnnnnnnnnnnnnnnnnnnnnnnnnnnnnnnnnnnnnnnnnnnnnnnnnnnnnnnnnnnnnnnnnnnnnnnnnnnnnnnnnnnnnnnnnnnnnnnnnnnnnnnnnnnnnnnnnnnnnnnnnnnnnnnnnnnnnnnnnnnnnnnnnnnnnnnnnnnnnnnnnnnnnnnnnnnnnnnnnnnnnnnnnnnnnnnnnnnnnnnnnnnnnnnnnnnnnnnnnnnnnnnnnnnnnnnnnnnnnnnnnnnnnnnnnnnnnnnnnnnnnnnnnnnnnnnnnnnnnnnnnnnnnnnnnnnnnnnnnnnnnnnnnnnnnnnnnnnnnnnnnnnnnnnnnnnnnnnnnnnnnnnnnnnnnnnnnnnnnnnnnnnnnnnnnnnnnnnnnnnnnnnnnnnnnnnnnnnnnnnnnnnnnnnnnnnnnnnnnnnnnnnnnnnnnnnnnnnnnnnnnnnnnnnnnnnnnnnnnnnnnnnnnnnnnnnnnnnnnnnnnnnnnnnnnnnnnnnnnnnnnnnnnnnnnnnnnnnnnnnnnnnnnnnnnnnnnnnnnnnnnnnnnnnnnnnnnnnnnnnnnnnnnnnnnnnnnnnnnnnnnnnnnnnnnnnnnnnnnnnnnnnnnnnnnnnnnnnnnnnnnnnnnnnnnnnnnnnnnnnnnnnnnnnnnnnnnnnnnnnnnnnnnnnnnnnnnnnnnnnnnnnnnnnnnnnnnnnnnnnnnnnnnnnnnnnnnnnnnnnnnnnnnnnnnnnnnnnnnnnnnnnnnnnnnnnnnnnnnnnnnnnnnnnnnnnnnnnnnnnnnnnnnnnnnnnnnnnnnnnnnnnnnnnnnnnnnnnnnnnnnnnnnnnnnnnnnnnnnnnnnnnnnnnnnnnnnnnnnnnnnnnnnnnnnnnnnnnnnnnnnnnnnnnnnnnnnnnnnnnnnnnnnnnnnnnnnnnnnnnnnnnnnnnnnnnnnnnnnnnnnnnnnnnnnnnnnnnnnnnnnnnnnnnnnnnnnnnnnnnnnnnnnnnnnnnnnnnnnnnnnnnnnnnnnnnnnnnnnnnnnnnnnnnnnnnnnnnnnnnnnnnnnnnnnnnnnnnnnnnnnnnnnnnnnnnnnnnnnnnnnnnnnnnnnnnnnnnnnnnnnnnnnnnnnnnnnnnnnnnnnnnnnnnnnnnnnnnnnnnnnnnnnnnnnnnnnnnnnnnnnnnnnnnnnnnnnnnnnnnnnnnnnnnnnnnnnnnnnnnnnnnnnnnnnnnnnnnnnnnnnnnnnnnnnnnnnnnnnnnnnnnnnnnnnnnnnnnnnnnnnnnnnnnnnnnnnnnnnnnnnnnnnnnnnnnnnnnnnnnnnnnnnnnnnnnnnnnnnnnnnnnnnnnnnnnnnnnnnnnnnnnnnnnnnnnnnnnnnnnnnnnnnnnnnnnnnnnnnnnnnnnnnnnnnnnnnnnnnnnnnnnnnnnnnnnnnnnnnnnnnnnnnnnnnnnnnnnnnnnnnnnnnnnnnnnnnnnnnnnnnnnnnnnnnnnnnnnnnnnnnnnnnnnnnnnnnnnnnnnnnnnnnnnnnnnnnnnnnnnnnnnnnnnnnnnnnnnnnnnnnnnnnnnnnnnnnnnnnnnnnnnnnnnnnnnnnnnnnnnnnnnnnnnnnnnnnnnnnnnnnnnnnnnnnnnnnnnnnnnnnnnnnnnnnnnnnnnnnnnnnnnnnnnnnnnnnnnnnnnnnnnnnnnnnnnnnnnnnnnnnnnnnnnnnnnnnnnnnnnnnnnnnnnnnnnnnnnnnnnnnnnnnnnnnnnnnnnnnnnnnnnnnnnnnnnnnnnnnnnnnnnnnnnnnnnnnnnnnnnnnnnnnnnnnnnnnnnnnnnnnnnnnnnnnnnnnnnnnnnnnnnnnnnnnnnnnnnnnnnnnnnnnnnnnnnnnnnnnnnnnnnnnnnnnnnnnnnnnnnnnnnnnnnnnnnnnnnnnnnnnnnnnnnnnnnnnnnnnnnnnnnnnnnnnnnnnnnnnnnnnnnnnnnnnnnnnnnnnnnnnnnnnnnnnnnnnnnnnnnnctgcgtggaggagggggaccagctgcgccgcgaacttcttgtagatgtcgtagcccacgccgtcgtggccggggctggagttcgtggccgcttgcatgagctggtcctccacctcgtccaccgtcagctcgtccgtgagcgcgctccgccgctcctgcggtgtcccgacgtcggccatcgcctcgcggaacaacgccccgcaagcttcatctggtaggaagttgatgcggggcgagttcaccgccgtgaagtgctcgtggagcgtgcccgagtcgatggggcacgtctccgggtgctcctccgctgcggtctccgccgacgcagcacgcagaatgtcctcgacgcacttgctctcgttgcgagcgaagtcgtggcggagctgctgttggcgcatcgaggcgcggatccggccgacgcggcgccgcgcacggcggacggccgatctgctggtgggtcgctcctgctgcaccgctgccatctcgtcgagggcctcgtcgagtcgatgctcgcgctgagtgcgcgtcacccggggcggtcgctgtcgctgctgctgctgctgcagtgtaggccgagggtggggctgggctgctgtgaagggctgcagcagcgaccggggatggcgctgatgtatccatcgcccgaggtccagctgtctgcgtcttcgatcttgcacgctagctcctccgccatggtctgtagggccgacgccgccgcttcctgctcgtcttcggtcagctgccgcagtcgaaggcgcggctgccgcgctggagccgtcccgggcccgataggcagcgtggggaacgcctcgccgccgtcgcgcgcggcaatctctgcgtcgatgtcctcgtcatgatcgctggcaggctcggcgcgcgtgggtgcgcacgcggggcgggcaggaggtgcgggttgctcgcgctggcgttgtgcagcaggattcatgtggnnnnnnnnnnnnnnnnnnnnnnnnnnnnnnnnnnnnnnnnnnnnnnnnnnnnnnnnnnnnnnnnnnnnnnnnnnnnnnnnnnnnnnnnnnnnnnnnnnnnnnnnnnnnnnnnnnnnnnnnnnnnnnnnnnnnnnnnnnnnnnnnnnnnnnnnnnnnnnnnnnnnnnnnnnnnnnnnnnnnnnnnnnnnnnnnnnnnnnnnnnnnnnnnnnnnnnnnnnnnnnnnnnnnnnnnnnnnnnnnnnnnnnnnnnnnnnnnnnnnnnnnnnnnnnnnnnnnnnnnnnnnnnnnnnnnnnnnnnnnnnnnnnnnnnnnnnnnnnnnnnnnnnnnnnnnnnnnnnnnnnnnnnnnnnnnnnnnnnnnnnnnnnnnnnnnnnnnnnnnnnnnnnnnnnnnnnnnnnnnnnnnnnnnnnnnnnnnnnnnnnnnnnnnnnnnnnnnnnnnnnnnnnnnnnnnnnnnnnnnnnnnnnnnnnnnnnnnnnnnnnnnnnnnnnnnnnnnnnnnnnnnnnnnnnnnnnnnnnnnnnnnnnnnnnnnnnnnnnnnnnnnnnnnnnnnnnnnnnnnnnnnnnnnnnnnnnnnnnnnnnnnnnnnnnnnnnnnnnnnnnnnnnnnnnnnnnnnnnnnnnnnnnnnnnnnnnnnnnnnnnnnnnnnnnnnnnnnnnnnnnnnnnnnnnnnnnnnnnnnnnnnnnnnnnnnnnnnnnnnnnnnnnnnnnnnnnnnnnnnnnnnnnnnnnnnnnnnnnnnnnnnnnnnnnnnnnnnnnnnnnnnnnnnnnnnnnnnnnnnnnnnnnnnnnnnnnnnnnnnnnnnnnnnnnnnnnnnnnnnnnnnnnnnnnnnnnnnnnnnnnnnnnnnnnnnnnnnnnnnnnnnnnnnnnnnnnnnnnnnnnnnnnnnnnnnnnnnnnnnnnnnnnnnnnnnnnnnnnnnnnnnnnnnnnnnnnnnnnnnnnnnnnnnnnnnnnnnnnnnnnnnnnnnnnnnnnnnnnnnnnnnnnnnnnnnnnnnnnnnnnnnnnnnnnnnnnnnnnnnnnnnnnnnnnnnnnnnnnnnnnnnnnnnnnnnnnnnnnnnnnnnnnnnnnnnnnnnnnnnnnnnnnnnnnnnnnnnnnnnnnnnnnnnnnnnnnnnnnnnnnnnnnnnnnnnnnnnnnnnnnnnnnnnnnnnnnnnnnnnnnnnnnnnnnnnnnnnnnnnnnnnnnnnnnnnnnnnnnnnnnnnnnnnnnnnnnnnnnnnnnnnnnnnnnnnnnnnnnnnnnnnnnnnnnnnnnnnnnnnnnnnnnnnnnnnnnnnnnnnnnnnnnnnnnnnnnnnnnnnnnnnnnnnnnnnnnnnnnnnnnnnnnnnnnnnnnnnnnnnnnnnnnnnnnnnnnnnnnnnnnnnnnnnnnnnnnnnnnnnnnnnnnnnnnnnnnnnnnnnnnnnnnnnnnnnnnnnnnnnnnnnnnnnnnnnnnnnnnnnnnnnnnnnnnnnnnnnnnnnnnnnnnnnnnnnnnnnnnnnnnnnnnnnnnnnnnnnnnnnnnnnnnnnnnnnnnnnnnnnnnnnnnnnnnnnnnnnnnnnnnnnnnnnnnnnnnnnnnnnnnnnnnnnnnnnnnnnnnnnnnnnnnnnnnnnnnnnnnnnnnnnnnnnnnnnnnnnnnnnnnnnnnnnnnnnnnnnnnnnnnnnnnnnnnnnnnnnnnnnnnnnnnnnnnnnnnnnnnnnnnnnnnnnnnnnnnnnnnnnnnnnnnnnnnnnnnnnnnnnnnnnnnnnnnnnnnnnnnnnnnnnnnnnnnnnnnnnnnnnnnnnnnnnnnnnnnnnnnnnnnnnnnnnnnnnnnnnnnnnnnnnnnnnnnnnnnnnnnnnnnnnnnnnnnnnnnnnnnnnnnnnnnnnnnnnnnnnnnnnnnnnnnnnnnnnnnnnnnnnnnnnnnnnnnnnnnnnnnnnnnnnnnnnnnnnnnnnnnnnnnnnnnnnnnnnnnnnnnnnnnnnnnnnnnnnnnnnnnnnnnnnnnnnnnnnnnnnnacgctcttgtggtcgagccacttgggcgtggtgcggcacgcggaggccgagcgggtccaggccgttgcggtcgtcctgcaccaccaggctgaggtggtagatgcgcagccaccgctgcacgtcggaccacagtgacccgatgtcgccgtggcggcgcagcgcctccgcgtggggcgaggcggcgagctcggagttgaggtagcaccgcacgagctcgtcgtcacgcccccgccagtgttcttcgcggaggcggtgacgcttgcgggccacctgccacacctgtgcgcgcgccacttcccggatcgctgggtccttcgagtgcagcatctgccacgcatgggcgatctgcagcgcgcggtgcatttccaccagcggctggagccccaagcccccgctcgacgttggtgcgtagagcacctcgttggttgccgagcggtgcaggcgtagcaggtgccgcaggcccttggctaccacacggtcgaagccctgcagttgggactggagcggtcggaggtggcggagcgcgtactcgaccttggggtagacgtaggtcttgagcgccttcaccacctgccacggcgccaaccccgactgcatcagcgccaccgcctcccgcttgatctgctgtagcttgggctctagctggagacggtggcgcacgtgatcgaaggcgtcgcccacgccgaggtagcggtagctgtcgtgcagcttgatgcttgagacctcctcgtcgtggagcgacagcttcatgtccttgtcgtgggcggggttgccgcgcgcgttgcgtgtcacggccaggaaggcgcacttgcctgggttggcctgcagccccgtccactccaggaactgctcaacgacagcgtggcagcgcgtgatgccggccgcgctgtcgctgaacaccttgaggtcgtcggcgtaggcggtggtgcatggccgcaccccgtccgccaacgcgacgcccactccgtcgagcttctccaatgctcggagcaacggcaccagcgcggcaatgaacaggagggggctgagcggacagccttggtacacgcccacctcctgccgcactggttccgtcgctccgtcggccgcgttgccgacgacgaagtaggagtcctcgtagatgtcgtcgcagcgctcgacgaacgcacgctcgacgccgagcaggcggagcacataccacagcatgtcctggtgaacggacccgaacgcgttccgcaggtcgtaccagacctggtacagcctgcggcgcatgcgtcgggtttggtccaggagcgtggttgccacgaagttgtgctcgtggcaaccattgtacgccctgaaccccttctgcgccatgggcagcagtccgttcgcctccaggtacgtcgacagccgacgcgccagcagaccgctgtagagcttgtagatcgcggtctgcaggcagatcggccgccagttcgctgggtcggtggggccgcccttcttgtggatgaggcggacgaaccccaccttccacagggcaggcacccggtggtggcgccaacagaactggaaggctgcgtggaggagggggaccagctgcgccgcgaacttctggtagatgtcgtagcccacgccgtcgtggccggggctggagttcgtggccgcttgcatgagctggtcctccacctcgtccaccgtcagctcgtccgtgagcgcgctccgccgctcctgcggtgtcccgacgtcggccatcgcctcgcggaacaacgccccgcaagcttcatctggtaggaagttgatgcggggcgagttcaccgccgtgaagtgctcgtggagcgtgcccgagtcgatggggcacgtctccgggtgctcctccgctgcggtctccgccgacgcagcacgcagaatgtcctcgacgcacttgctctcgttgcgagcgaagtcgtggcggagctgctgttggcgcatcgaggcgcggatccggccgacgcggcgccgcgcacggcggacggccgatctgctggtgggtcgctcctgctgcaccgctgccatctcgtcgagggcctcgtcgagtcgatgctcgcgctgagtgcgcgtcacccggggcggtcgctgtcgctgctgctgctgctgcagtgtaggccgagggtggggctgggctgctgtgaagggctgcagcacctgccggatgcgaccggggatggcgctgatgtatccatcgcccgaggtccagctgtctgcgtcttcgatcttgcacgctagctcctccgccatggtctgtagggccgacgccgccgcttcctgctcgtcttcggtcagctgccgcagtcgaaggcgcggctgccgcgctggagccgtcccgggcccgataggcagcgtggggaacgcctcgccgccgtcgcgcgcggcaatctctgcgtcgatgtcctcgtcatgatcgctggcaggctcggcgcgcgtgggtgcgcacgcggggcgggcaggaggtgcgggttgctcgcgctggcgttgtgcagcaggattcatgtggaggcagctctccatcgccccttggtgctcgccgcactcggccagcgaacgcttcaggtccagcgcccggtttgccagtctgtccgcgtgcgcgttcgccttccggtcgatgtgcttgagcgttaaggacgtcactgcgcggagggcgtggcggacgcggttgcgcagctggcggaggcgcgggttcctgcaggcgaaggtgcccttgacctgcgctacgacgaggtggctgtccccttcgatctccaggtgcgaggctccgtggtggacggcgctctgcacgccaagcagcagcgccgtgtattcagcggtgttgttggtctcgctgctgtttggcatgtagtgagagcacgtccacgccacggtcccgcacggcttgaacaaggcggcaccagctcccccaggtcccgggttccggcggcaggcgccgtcgaagcggagcacccacggctcgggcatagccggccctccgtcgacgtccatcgcatcgggggctgtcgtcgtggccgcgggggaagcgggcgggtctgggcagcgccgagccgaagcaggccggcgcgtcgctggtgctggtgccgtgggtaggcctgtgagcaggcgagctacagccgctgccccgatcgcgccgtgacgtggaccccaccgtgttgcaccggtgaccggtgcagcggagcccagaggccggtgcgctgccgggttagcagcgtgctcgtcgttcacagcctgggcagtgtcgttcatgccaggtcttgggccccagcgcgttgctcgtctcgctggaggtggcggcgtctgcgccgtggacgctgccgtcgtcatcgtctccttctccttgatcgctgtcgtctccgtctcctcgggcgctgtcgtcgctgtcgtcgttgtcgccgttgcagctgtcaccgtcgggggcggtgtcgtcgtctccatcgcgtccgcggtcgacggcggcggcgccatctcgatgtcaggtgctggctccacctcggcggggtggcgggccagcacgggcggcagcggcgtcgccgtctctgtcgctgtcgtcgccgccttcgaggttgccgtcgtcatcatcgccgtctccgtggttgccggcgttgcctgtgccttggtcgccgacgtcggctgcggtgccggtgccgtctcgacgtccgggtgtggcgtcccgtcggcgggatggcggtccagcatgggcgggcccaccgccgtcgtcgtctccgctggtggcggcgtcgtcttcccgttcggcggtccctgcagcttcgcgggcgtccgtgtggagaaggtggcggcgctggcggtcgggttgagtcggcgccgcttacctgtaacctgctgcgccaggcgagatcgggtgggggtcagcacgggggggacatgctgacgcccaggggtcttgggagcggcgggcacagcgctctgcagggtggcggtgtctgccaccgcagtgccgcgtggtgcggctgctgcagcggcagtccttgctgcggcggggctgctggtgggggtcgcagcagccccgatccgcgtcggggggtcaacaggtgtcgggggtggcaccgctgcctccgaagcttgggccgtcgcggaggtggcggccgcggctggagggttgcgctgggtacacgcttgggcgtggcatgcagccacgatccgcgagaagaagatgagcgagcaccggcacccgctggagaagacgtcctggaagcgggtgccgtggtgtgctgctcgacggtgcgccaccagcgtcgcgaggttcggggcaacgtacgcgcacaacgcgcactcgaactgggcagcgtcgtgcgcgtacgtcgcctgcaccgtgccctgctggccgtcgtccggtccaaagtgctggggctgggtcctcggtgctgcttgcacggccgcgagtttggccgccgtggcatcgctcacctccgtcttggcctcttggtcacctccgtcgtggccttggttcgtgcagcgtctgctccggcggagcgcgtcgcctgtcatgggctccgcgcgcgcgcgtggctgatagtagcgtgctgggttcggcgtagcgcgcgcgcggtgccccacgggggcgcgcacaacaggagctgctgcatcttggacagctgcggctgcgtctgttccgactccggcggcagcggcagccgcagctgggcttggtgttgggggcgcctgggctccaccttcggcgagcatgccggccgccctgccgggtcctgccaattcgctggggggtcctgcggcggtgccgcgcgctggaggggctggcggggggtcttgggcagccaaccggcgcgcgtgggggtccgtagcaggcgtgggggctgcgcaggagccgtcgctccgcgcgcctcgccgaagcgccgcatgctcgaggccgtgttcttcggccgtgtactccgtgccgcgcggcgcacgagaggcccgggatcctggcatagtgaggccaggtggacggggcccggtcccgcccggcggacggtccgcgggcccgcgtccgctcgccgtcgccgcgaagcgacgcgaggttgaagcggcggaccgggcctcggcttggccgccagagggcccggcccgcggtcccgcaatgggcgcaatgggcgcagcgggtcgcggacccgtgcccgaagttgcgccggccaactcctcgccggtgccgagcagcggcgccgcgcgtggagggtcgccggggccattttcggctccggccgagcccaaaacgggggcgggcggatccccaatgcgtaaccgaagccctagcggatccgcccccgcccggacgtccgccagctcagccgccccagccccgtcgctggccgcgctatagaaagacgcgtcgctggcgaggctggagtggctggccgtggagcactcgctgtcggtggacggcgagcgctcccggggctgccagtccggccaccagaagcgcatgcgccgatgcggtggtgaagggccgaaaaaggtagttggatagaaaagataagtgtagtagttggcctcacgagggataggtgaaagcccccggagaccgtaccgcgattggctagcaagctaaccgaaagcagcagttccaaaaataaatgtgaaaaagaccccaccaaaagcagggaaaccagttttcacactgattagaacagatactacacttgatcttagccaaaggccgagaaggtatgatttctaacagtagttagcatttttacttatacacttgaatgatccgtacggacaaacatttatttgatgttattattacggttatgacccttctgcatttgttagtagtgatgtttgatgctacttgaatggctaaattacgtttctggccctaatcaagttaaagtacatgtagttgaagtgtcttgcccgtagaagctccaagctgggaatcggaagctctagcaaaagactcgactcatgcatgcatacagacgtagagcttcatatgcagcgagggatacggtcgcaacgcatccgcaggtcaaggggggtgatgatacatgtacgccgtcctgctgtaccacttgcacggtacaatatccgatcaaaatgcacccatggcaatatattttcggtatcatagcgcgatcatacgaacatcgatccgtagctcatagcccaagatgctgcagcagctcgtcgtgggcgtcgtgggcgcgcgcgacctactggtcggggacctgaacggctcgagcgacccgttcgtgcaggtgacggtgctggacgccaaggggaagccactggccgcgggtggcagcttcaagacgcgcgtggccaaaaagacgctggcgcccgagtggaacgagacgttcacgctcggctcgcgcgacttcgacctgcgcctggccacggcgctgcgcttcatggtgttcgacttcgacgggctcaagcgcgacgacgtgctgggcgtcgtcgaggtgccgctggacctcatcacgtgcgaggccgcgcccatggacgactggtaccgcatcgtcaaggtgccggagctcatgagctgcgacgccaagggcgagctgcgcctgaccttctccaagccgccgccgccggcatcgcccgtgggccgaggcaaggccaagtcggttgcgttccgaggcgcggagggacaggaggggggccagggggaggaaggggacacgagccccaacctgctctacgtgaccatcgactcgggcaaggacctgctgcccatggaccgcaacaacagcagtgacccgctcgtcaagctgtcggtggtgggccagcgccaccagaccgagaccgtggccaagacgctcaagccccactgggacgagcgcttcgccttcctgctcaaggacgcgcacacgacgctggagctgctggcggaggacgaggaccgcacgatcaacgacttcctgggccgcgcgcagctggtgctggccgacgtgatcgtgcccaacgaggagaagacggtgaccgtgacgctgctggacaagaagctgctgcccgacaaggaccgaggcacgctcaagctgcggctgctgtgggtctacgacccgaacgccgagagcatcaccaagagctccaataagaagaaggagaagtccatcctgcagtcgctcaagaagtccatgcgcgtcagtgcgccggacggcccgtacaactcggacgacgagctcaacgaggaggacgacgaagtggtggacgtcgagagcgacgatgacgtcgacgttgcctcgctccccccgccgccgcccgggacgaacaggctcaacttcttggtggcgacgatccaccgcgtggaggacctgcccccgatggactcgctgctgttcgacaagggcgagaaccgcaagcacaacggcgggggcattgatgcctacgtggctgccgcgctctcttcggagcctgaagacttcgtccgtacgcgggtgcgcaccaagcaggggcgacgcgaccagttgaacgtcaacttccgcgagagtttgatgatgttgctgcccgacgagaagtgcgaggacaagacccacgacgttatcttcagcgtgatggactgggatcctgtgggcggcgacgaggtcgtgggcaagttcgaactcaaggatgtggaggctgtcgccaaagctcatggcaacgaacccttctgggtgaacctgtacggcgcgccggtgaagggcgccagcaacaacagtcgcgcggctgtgctgatgaacgagaactcgcacttggcgtcggcgtaccgcgggcgagtactactaactctgcgcgtgcgtgcaaagtcgtcggatttgtacgacgccaagcaccagaagcgactggctccgaagctggcgatggagaactaccccgccagccacgtttaccgcatgcgtgctcacttcgtgcaggccgtcggtctcccagcggctgtggctagtggaaagctgtcgctggtgctatcctgcggcctccaccagattgcttcgacaaggaaaaaggctgagaatgggagtctcaagtggaatgagaccgaggagagcgacaagatgttgtttcctgtggacgcgtcccaggtgcctgacgtattcttgtacctgtgtgagaaggacgacgagaagcgtgtggccatctgctacaagcgtttccaggccaaggacctgctttcgtccaagttccagcgtgaaatggagtggattgcgctcgtcggcgatcgcgcggtgggcaaggctaaaccacgggaggaatttactggcaaggttctagtgcgtttgggcttcggccccatcgagacggccacagctcagagctgggaccagaaggagatgatcgagcacgtgaaccaccgcatgccgtaccaggtccgcgtccgcctgcgcgaagcccgcaacttggtgtcactgcatgccagtaccaagaccatcgttgcgagcgccagtgttcagtgctgggacagtatgcagaagacgaccgaaactaacggagaaccctctacctctcctgtgtgggcgcaaacgttctgcatggacgtgaatctgccgaatctacgctacgcgcctcaagtgctgatccatatcaagaacgagagcccgcgcgagtacattggcacggcagctgtgaagctttcagatgccgcagacggcagcactgcggatgggagtgtgacgttgtgcacttctcaagaactcaagcagaacgaacgccccaaggagcccacgctcaagtggctgcccgtggttttcaacggcgacgacgtagagacttcccacggccaggtcctcacctcagtcgagctcatccgcaaggctttcccggatgaaacactgccagatccagaggcgctggagaaggcccacatgaatgcgtgagaccacaactggagtaggttgaagagagatgacctggaatttgctgaatgaaatgaacatgttgcgtctgcgaattatagcatgcgactgcttgttgtaactcgtgtgagtgtattttgaacgctactcggtactgcagcaatttattgtacgacaaggtggcgtcgacaagctgtgtagaacagcatcgcgctggtgagatgttgtacacgcttcaagaagaaccccctctccagtagatacatggggtatgccgcacccgatatttcccgtaagcaaaacacacataacatgcaacatgcaactcataccatatcgagcttattagctgaggcggtccacctgttcatctccatgtgccgctgaggaacctcgtgtgccaaactttccgattgtgctgccgaaggcactgttatcccatcgtaatatttagagttggtcttggataccaagtcgtacgtcgcgatactttgcatgaacgcaactgtagagctgcgagggctacctatcgctgccttgccgtatggtgccaccgacagcccgaacggcaaacgaacttgtgccggggcgcaaggacacggtcccacctgcgagcctcactttcaattctcccccagaagatcacaaaaggatgaatcttcgtgccctcgctgccgacactttagcctcgctcgcatccgtctccggtggcatcatcggccacgaccaagtcgttccgttcccgcagtcccagcccaccaccatcagtaacaaggccgcactcaagttcaaaccgcagctctggatcaacaatggctgccacccgtaccctgtcgtgaacgctgcgggtgacaccggtggcggtctcaagacccacggctcctccgctgcagggtgcagatgctccggctacggttcgcaggtctacgggcgatctacctggtacaatggcgtctgggccatcatgtactgctggtacttccccaaggacgaacctcaagacggcactggccatcgccacgactgggagcacgtcatcgtgtggatcgacaaccctgatgtcgagaacccaaagatcatggccatgacgccgtccgcacacagcggctactccacgtacgcgcttccgcctgcggatatggtggacggtacgagctgtaaggtcgagtacacttcgagttggctattcatcgaccaccacctagaaggaacgtcaactgcaggggagttccaggacctcatcatgtggagtgatctgaccgacggggcgcgcctcgcgctaaacactacgagcttcggcaaggccaacacccctatgaacgacggcaacttcctaccgaagatccagaaggcgtacccgtggtcgaatgagcagcaggagcaacaacagcaaggacaacaggaccagcagcaacagcagggagcttagtgctcgaagggtagtgaagcgacctacatgcacatacaaactgttattcgatacgtttacaggcgtgtcgagccaaaacttacggagtacatctattactcacatatgagtaatgcagatcaaagtgggaagaaggacaggaaacaggggacttaggatcaagctcaataacattcacccctacaataacttcgaagtagtttccaggccaacctttccgaatggtgttgtaccttgttggcgtgcaacttccgaagggtatcgtgttactcaattttaggtaaaaagctaaaaaaatggagtatgttacgattctaagatcgaatgaatgaattagcaaatgcgcactaaacgtgtctacacttctcacgtcttcccgctttgtaagcttgtcgttgctaatacagtactacacggatggagcagagctggtaccaggtctgtagcactatgccgtgatgagtccgtgttgttctctgagagctttgaatgatcagcggcactgcgctggactggccttgagtgggtacccacgcgcttcgatacacttccaatgttctgcggcgaacaatctccccagattctacgcggcaagtagattagttagagtggcattagcggaatactcaggagtcagcaaaatactcagaattgtggtatttcctttgagtaatatacttttacaaagttaactcgcaccacctgctcgtgcacgacggctatcaccttcgggtgcaagacttggccacttagtggcccacggtggtgatggcgatgacgatcgcgaagtccagcatctttcggttgtcgctcgtccagatcctcgagatgaaccaccacgagcgcttgttgagtacaaaattagcacaaagcaccttatttttccgaagcaaaatgagctggagagaactacacgtattcgtctgcatccgtatccggtatggcggtggactgaagcgtccagctagtcgacagctttggaacacaatgccttccgcgcgaattcgagttcttccttgggtccgttgtaaacgtgaacaccgaaattatagcgtaagtcggttctcaaagcgatagacccaggaaataccatgggtacccactacataatgcccctagtgatcttatatttgagactcatgccggagtgtttgcatccacactatctgaaataggctttgaggctacatcttgtgccacagtcgtgcacaagcaggtggacatcggctactagcggcgtccatttcttcatccccaaaaccccaaaaatccccaaaagtcaaatctcagatttaggaaccatgaacctaacttttactaagacccattatatatctagcttagagaaaccagccgcgctgcgcttggctgggcgcccccgcccgcgcgggtgtgctgcggctacgctcctcacaaccgctcacctccgttggtcgggcgctatcgcgcctctgggatattacaccaaaaaaattagcctaatatttagttaccccaatactaagagttatttatttcttggggacagtttgggggcgtttaattgagattttggggagtaacaaactgtttttattgaaagtccccaaaatttgttgggggattttaggggactttgggtacgttttagggatgaagaaaattctcccctactagcagcccatgctggacctgacgaacaaacatgaaagtgtcttgaccgaacattgccagttagtggcgaatactgttgtaatgctatgatactgtagtttcaagcatgtcaccagcccagatacatttccctggggtgacggtttagagccagcggtggtgaaagctgcaacgtggcacaccaggcgaatcaagatctctggataggggtttcaacgtagcattgtagtgtatcggacgcagcagcagcaaaatcgaatgcgcaaggagttggcagcagagcacaacaaaacgcccggaacaagcgctggacaagggggaacaagcggaactcggccctcctcctctcaaaacaaggggtttaaaggataaaagattaagtaataacccaccagtatcttcgcaattcgccacaactcttcgtattgatcccatgagaacgaaagctcgagaccaaccttgagtaaaatagtacgctttcttttcgtggacacgtacagacacgaatcttttccgatcctacacccgctgcaacacccgctgtattacactacaagcagatgctaccgaggaagtaaggcgaaagtattctttcaacaaaacaaattgacccgaggccaacaaattttatgcaagtcggataccgaacgtgtacatgtacacgtacgtacctgtcgcttcatcgatccttacaagacgataggcaagattgtagaccgacctcgcgctatgtggctccgactcggagcccggagacccttccaaagcaagaacaatcacttttactttttcttctcactgcagacggcaatgaacctccgcgctatcgccgctgtcactgctgcctcgctgatatccgtcgaggcgggcgttattggccacgatcaagtggttccgttcccgcagtctgccgctacgtccgccgccaacatcgccgccctcaagttcaagctccagatcttcatcaacaacggctgccacccgtatcctgccgtgaatgctgcgggagacacgagcggtggactcaagcctagcgggtctgtcaatgccgggtgcaagggatctggttacgggtcgcaggtgtacggcaggtcaacgctatacaacaacaagcacgcgatcatgtactcgtggtacttccccaaggacaaccccgtgactggcctgggccaccgccacgactgggagcacgtcatcgtgtggatcgacaacccggcgtcgagcaacgccaccatcttggccatgactccgtctgcgcacagcggctactcgacgtacgcgcctccgcccgccaccatggtggacggcaccagcgtcaaagtcgagtacacgtcgagcaaagtcgtcatcaaccaccacctggagggcacgtcgactgcaggagagacccagaacctcatcatgtgggaggatatgacggacgctgcacggtacgcgctcaacaccacagactttggcagtgccaacgtccccatgaaggacggtaacttcatttcgaagctgggcaaagcgtacccgtggaagtgaaaacgacacggcaactttaactcaaaaagtgacaacaattccagtttgttgaaaaataggtttgaaatgtttgaaaaatgaacataagagcaggtaaaaagactcactgagttcatttgattttcactttaaaaaaaacttacacatgcacacgaacgattgtcaaaacggccacgccctgtcgagcttaccaacgaaatttccgtcgttcatcggcacgttcgcgtcgccgaagcttacttcgttcagggctctgcgcgccaagtcactcatctggtcccacatgatcaagtcctggaaatcgccgccctccgtcgtcacgtccgtggcgtggttcatggggtagttgctctcgtagttgaccttgatgctcgtgccgtccagcgtgtcggcattcggtggggagtacttcgagtagccgctatgtgctgacggcgtgaccgccaaaatgatcgggtccggaacgtccgggttgttgatccacacaatgacgtgctcccagtcgtggcggtggcccaggccagtcgacggcgagtccttggggaagtaccacgagtacataatggcccagacgtctctgtgccaagtggagcgaccgtagacctgagaaccccagccagatcccttgcagccagcgctgggagctcctgatgtcttcaggccgccgctggtctcgcctgcgtcattgactgcagggtacgggtggcatccgttagtgacgtgcagttggggcttgaacttcacggcggccctctcggaaatcgtgacaggctcgggctgggcaaatggcctcacttggtcgtggctgatggtggtgggctgccaatgctgctgttgctgctgttgttcttgggcttgaaccgtggccagagcggcgacagtcgcgaccaggaaagtggctagcttcatcgcagaggcttggtgttggggaaggagtgtggtcgactgggcgaatctgaaactgcctgtcaccgtcggacagcaagatgtatagagcaacttgcagaccgatgcagcgagcaacagcaggagggacaacgcgcagcatcattaggatattttagttgacagagaaaccacaaggcgcgccctacagattggcaaaacctcccccatctcacggaattttcacttgccagacactttacacgtttcttctttggttactcacggacgtcgtttaggcgtgcatcgccttattcccataaactgatttgtcgatatacatgtactgcacaagtattagtaagagtagtctatcccatcggctggtgtaggatcaagctgcacattggagttttcttgcccatgtactttgggcgggttgatgtcttggagcaggacaggttcccaacgccgtacaaaattttaaggttaacttaacatcatcgtaagtaccgcggtgtgagcgtgagcgagcaacaggtggtttgcaggattacaaaaaattaatctctctacacggttgcattgcacaacctttagtaaaatgttactgcatccccatcagaagaagtgatcttgatatatcgacgactaaggcgctgctgcgtagttacaccgtcggcgagagcagctgcgaattgctatgcaatgggccaacgtggcaatggtaagacatggcccttgtgtgtagtgttcttgcgaaaaattgctgttgcggcttcatgtgagggacattcgtctcgccagccatgtagcacgcgtggtagttgacgatgacgatgccacgtttgatgtattgcatgtattttcgtccttagtttattgctgctgcgcgctaagttttggatccgagcagccgtggaagagtgcgaggaggtggccgcgactagcgccgccacggagcccgcaaacccttccgcgagcgagagagctgaggcccgcaaggtcgcttctcgttttcttggcgacccaatgataattaataagaatccgcacggacacaaagaagctttctaagcatttcttatgcaattttaatcttaacactgcattgaagcacgtaggcatgcgcttttgctcaacaaaaggtaaatatgcccatgttcctatggtctaaccaataaatagtcgagctacgttacgtaccggttacgtttcaaagcacacgcggtcttgcccgccgcagcaagttgaaaacgagctatatctcaggatagggagcgccaaacgcagacacagtcgttgtgcttacggatgagcaaagacacataattcaataaatattgtagatacgggcacttcattctatcacccgagtcttcttcatgtgtatgcacctcctcagcgaatcattctcgttggcaacgaggcagccaagaggcgagccacactcacaacgttcagtgctaatgtcccaagcagatggctcgagaatgaacgccacctgcgtggcaatgcccccatacgatgcccctctggccttcgtattggattttcaaccctgtcgacggcgtcagtttacctggccattgttacacttgcccacagcgtccaatgacacgcctgctgccaatgcgaatgtgactcctgctcataattctcggtgggctccaattgtgatggcgtcggagccgcgcgtctgcgagctcggcgacttgcgcgtgaagctaaatcacaggaggtatatggcaggcgatctgctccggggtcgagttctctttcgagcgaccaagtgtgtgaagagttccgactttgtcgttcgcctagagggccgagaacacatttcgtggctggagcatcgcgctagaagaaggcacaacaaagacgttctccaggaacaggtacgcatcgttgccgtaagttagtttgaatccttccgcgtagactttaattaacatctttgtggtctttttgccgacaggtttcgctactggacgcttcatcagcgttccgacctggagagtacgaggttccgttcagcttccagctaccggcatcccttccaagctcgtttcagatgaaagaccgacaattagtcgacttggggagcatgaagtcctccatcacgtacaaggttcgcgccacgatacgcatcgacggcgcactccacccgtacatcgaaggctcttgcccatttatcgtgcatcgcccacctccagacagcctcatgcagccagtcgagcgatcttcatcggaaaagatccgcgtgtttcgagtcttctcgcgcggcatttgtacgctatccgcttcactggatcacgacgaggtgactgccggtgacatggtgacggtgttcactagcgtgaagaacgagacgtccaaggacatgacggggatctcggtgcagctcgtcgaagacctggcggtggacgtccccttccgcacgcagaagcgaggctcgactgtcctgtgtcgacgagacttcccaggagtccgagctagacgtcaggcggaccgagctctgagcttgaacttggccaccgagacgccgtggagcttcgagtccattaatccgaccatggcgtgcaacttcgtccagtggaagtaccgactcgttgtcacgtgcagctttcgcctttgttcaagcgtgaaggtcgagttccccgtgacggtgtcgtgtcctaggagtgctggcaggatgtcgatggttagactcccaggaccattctcgtctcctctaggcgtcgaggacgtgcccttaggcccaagaagcttgcctcaactctctcgactcagccagagctttctagaaaggagcgccttatcctacgcgcattagtactcgaggcgtagttagggtgtgcaagcttattgtactcctctaaatagaaaacctattgctggagaagtatccccttaattctgacaagacttgtaggtgtgtaggtgtcgaatcggaatgtggttgaaggagacaaggtccctactagggactccctagtgcaacgcgttgtgcctcaagtcgaagccgcagcgtaacgcgtggccaggtttaccccgtgacgatgttcctgagcttgcagctgcaacggtccggcggtagttgaagttttgcgcacagagtgacccagtgtgtgatacatgtgggacacataaatagaatattgcagtagtgatctaagtgtattgtatcgaaagacccacgtcaacgcgtatgtgtttccaaaggtattttccgtctgcatggtcgcggtccgcccaagcagccgcttcaaccacagcctgcataatgccacgcacttgctgggctccacacaggtcccaacgtagctgagagcccattctgctattgaccagcaaaagctcaagtgacccccctctccgtaaagatggccgtcaagttcctgaaccagggcgccaagatccaggagttcaccgtgggcggccgcaacctcgtgctgggcttccccacgccggagctctacatccagcactgcggcccgcacttcggcgagaccgtgggccgcatcgccaaccgcgtgtcgggcgccaaggtggagctcaacggcaagtcctacgacctcatcgccaacgacggcgtcaactcgctgcacggcggcaacacgtgggggctcaaggacttcgagggccccttcgaggtcaagaaccacgagggcaaggacgccgtgcagtacaagctcgtgagccccgacggagactcgggattccccggcacggtcgagttcacggtcacgtacacgcagacgacgagcacgacggagaacggcaaggagctcgtggagctggaggccgagtacgaggcgcagctggtcggccccgaggacgtcaaggagacggccatcaacatcacgaaccacagctacttcaacctgtccgaccgcgagaccatcgacggcacggaggtgacgctcgcctcggaccagtacctcgtgccggacgagggcaacatccccacgggcgccatcgagagcttcccgggcatcaaggcgcacgagaagttcacgctcggcgtcaaggagcccaacgtggaccactgcttcctcatgaaccacgactccaagagcatcccgctcgacacgcgcagcctgccgctgcagctgctggtcacggccgagcacccggacaccaagatccacctcgaggtgctcagcacggagcccgccttccagttctacacgggcttctggaacgacgcccccgccgtggccggccagcccgctcgcggatcgcgctcgggcttcgccgtcgagcctggccgcttcgtcaacgccatcaacacgcccgagtggcgcaaccagatgctgctgcccaagggcgagaagttcggcagccgcatcgtctaccgcgcctgggcggcctaagcgtcgagtttgatcgacgcttgaccaaggactttcgtgccgggtggcgatggatatgagcagcgggcacaactacaatctgagtagagcccttggtgtacggatatgcgtgagtaaatacaaattttgtgattcaaaagggagtatttgttcgactttggacgccccgatgtcgtcgacgcacacgaccacgtgcccccggtcatggtggaggcccagtcccgagatcggagggtgcttggggaagtacatgtactactggtatggataccacgagtgcatgatagccgttgtaccgtacaacttgcacgtcgttatacggccgtagatttggctgccataccagaccccttgcagccagcgctaaataagcccgcgggcttgcgtgttgccgtccttgtcctcgctggtcctgccagcttccaatcgagtcgaggttggatatccacggatgcatgaagcgccagcacttgggtagcatgttgaagttgcactggttgacgcattatatgtgggtcacaccataattctgaattattattctgttcaaattcccaaatagcaattattggagatgatgtcggagcgcaagcggcggcggctggacgaagacgcccggcgtctggagctgtgcgcggccgacctgcgcgagctgggcgccgccatcggctcgtgcgcgttccgcttgccctcggagaacgtgtcggtgccgctgcagcgctcgcgcgcggcgtccaagcctcccaagccggcagcaagttccggccgctcttcgtcgcgctcgctgtactcggtggtgtccagctcggcgtacgcggccaagacgaacgcgcagagccggcaggagacctggcaggaggcgctgcaacgactggcggccgagctggacgcgccgcgcgcgcagaaggaggcggtggggcgctgcgagcggctgcgcagacgcttcgaggcgctgagcgacgccgtgcggctgtgccaggacaagctgcggcgcgccggcgacgaggtggcgctgcaggaccgcgtggagagccagctggcgcaggaggagacggcgtgggagcagcagatgcagacgcgcgagcagcgcgtggccgagcgcgaggtggagctgcatgcgctgcaggaggagcgcgcggcggacgaggccggcgacatagcggcggcagctgcggacgaagagaaggaggacgaggagaagaagcaagaggatgccgatacagaagaagacgcagaggtggatgaagatgcagagcaggcgcgcgcggagctgcgcgaggcgctggccctgcgcgccgaggagaagcgggacatccaggcggctattgactccctgcagcgcaaacgcgccaggcgcagcgccgcgctggctgaacagaggaagaaactgcagcaacggcaagagcaggaggaggcggagaacgtggaggcggatgccgccgcagccgcgcggcagcaggtgctgagggagctgcgcgacgagaaggaggcactgcagacggatatcatcgcggcggaggagctggaggagaaactcgaggagaacgtccgggacctgccggcgctcaaggacgagctgcagcgcgccaaggcagagcgcgcgcaggtgcaggcgcaggtggactcgctgcggctggagctggcgcggcgcaagcgcaagatgcggcacatggtggacgtgcagctcctgacggcgcgcgacacgaacccgccaactctgcgtgaggaggcagtgctgctgcacttgctgtacgagcacgagggcgagatgggcgtgaacgagctcaagcaggaggcgagtgcggtgctggaggagcacggcaagccgaacggcaacggcgtggtgatccgcgcgctgtactcgttggtagcgaatggcgtcgtgcagattgaccggtcgtacggcaacgggctggtcacgtcactgctggtttgatttatttgtcgagtacgttattgagcctaatagcaagtacgatgcgtttgcacactctaactctaacaacggctaatgcgcgtaggataaggcgctcctttctagaaagctctggctgagtcgaggagttgaggcaagcttcttgggcctaagggcacgtcctcgacgcctagaggagacgagaatggtcctgggagtctaaccatcgacatcctgccagcactcctaggacacgacaccgtcacggggaactcgaccttcacgcttgaacaaaggcgaaagctgcacgtgacaacgagtcggtacttccactggacgaagttgcacgccatggtcggattaatggactcgaagctccacggcgtctcggtggccaagttcaagctcagagctcggtccgcctgacgtctggctcggactcctgggaagtctcgtcgacacaggacagtcgagcctcgcttctgcgtgcggaaggggacgtccaccgccaggtcttcgacgagctgcaccgagatccccgtcatgtccttggacgtctcgttcttcacgctagtgaacaccgtcaccatgtcaccggcagtcacctcgtcgtgatccagtgaagcggatagcgtacaaatgccgcgcgagaagactcgaaacacgcggatcttttccgatgaagatcgctcgactggctgcatgaggctgtctggaggtgggcgatgcacgataaatgggcaagagccttcgatgtacgggtggagtgcgccgtcgatgcgtatcgtggcgcgaaccttgtacgtgatggaggacttcatgctccccaagtcgactaattgtcggtctttcatctgaaacgagctcggaagggatgccggtagctggaagctgaacggaacctcgtactctccaggtcggaacgctgatgaagcgtccagtagcgaaacctgtcggcaaaaagaccacaaagatgttaattaaagtctacgcggaaggattcaaactaacttacggcaacgatgcgtacctgttcctggagaacgtctttgttgtgccttcttctagcgcgatgctccagccacgaaatgtgttctcggccctctaggcgaacgacaaagtcggaactcttcacacacttggtcgctcgaaagagaactcgaccccggagcagatcgcctgccatatacctcctgtgatttagcttcacgcgcaagtcgccgagctcgcagacgcgcggctccgacgccatcacaattggagcccaccgagaattatgagcaggagtcacattcgcattggcagcaggcgtgtcattggacgctgtgggcaagtgtaacaatggccaggtaaactgacgccgtcgacagggttgaaaatccaatacgaaggccagaggggcatcgtatgggggcattgccacgcaggtggcgttcattctcgagccatctgcttgggacattagcactgaacgttgtgagtgtggctcgcctcttggctgcctcgttgtcatcgaatcgtggagggcatgtagaagtctcaggtaccaattcgctctctggatacattatttctgaggttttcgaaacggagctgccgtacgagtgcaaaagcgagctacatgctggtcctctatcagttttacgctacagttaagaagaaactacatgtgctgcgatcttatccttatctcattcaaaacacgaacggtagttgtcaagaatgcccaatcgaaacagttgcgcttgcttggataactttatcaaaggttttgtacgacaatagttcccccccgtgaattacgcgtagtaagcgttgccgagcttcatctggaagtttgcgtccttcatcggcacattggcgtcgccgaagtccgtgttctccagcgccgtgcgtgctgtgtccgtgagttggtcccacataatcaggtcctgcgtctcaccagcatccgatgtgctgtcgagggcgtgattcacgaccagccagctcgacgagtagtccaccttggcgctgtagccgtcaatggtaccggactctggcgggtagtaaatgttgtatccgttgtgggccgacggggacacagcaatgatcgacgggctggcgagcgtgatgtcgtcgacccacacgaccacatgctcccagtcgtggcggtggcccagtcccgagatcggagagtccttggggaagtaccacgagtacatgagagcgtagacgccattgaacgtcgtgatgcggccgtagatctggctgccgtacccggaccccttgcagccggcgctagatgagcccgtgggtttgagtcccccactcgtgttgccgtccttgtcgacggctgggtaggggtggcagccggatctgcggcttgaacttgatgcctgccgcctactccgctgtcgaagctgtgggctgagcgaatggaacgacctggtcgtgcgagatcacgtcggcttgggtgagagcgagtgaggctgcggccgcagtgaagaacgcacggaggttcatggtcgagaaggaggaggcttgggcacttggaggcgaattgcaaaagtgtgttcgaagataccaagggggttttaatctctcgacgttgcgctcgactggcgagattcaacgagatcaccacatcgcatcttggtggacgtctgcaagtgctacaggataggctaggagcgtgagcaatggtggagtggcggcacagaagcaggctcgcctccaccttcgatcaggctgccagcagttaagcacttctaacaaggggcgtcttaggtgaagcattcgttgctctgagcattgctctcgatacagtacatgtagtggaggggtcttgcaaatccttcgagatgttgatgttgaagtcacattcgcagagctcacagcagcagcttccaatggtggcattcaggaaccaaaacctagtgctcctggcccacaaccggcagacatcacagccatgcacggaagtgtagcgcagtcgactacagtctgtactccacaggaagcgtctggtccacgacagtgtccatggctgcctcggatcaccaggatgccctacacatcgccccagggaccagattcatgaaaatgcctgcctcgtccgcaggcgctgattaacccttaataatgtatgtgcggcatcttggtgatccccttcaagctcactctgcaatttgcgccaagccccgcatcttttaaccccaaggacatcgactcgcaccatgaatctccgacgtctcgtcgtcgcggctgtggctttcctcaccgcctcgcacgcttccgtcatcgaccacgaccaggtcgtgccgttcgcacagcccacaccgacctcgacgtctcaaaccgctgcggtcaaattcaagccccagctccacatcacgaacggctgccacccgtaccctgctgtcgatgcggacggcaacaccagcggtggtctcaacccgacggggtcgtccagcgctggctgcaaaggctcgggctacggcagccagatctacggacgctcgacgtggtacaacggcgtctgggccatcatgtactcctggtacttccccaaggactcgccggcgtcaggctttggccaccgccacgactgggagcacatcgtggtctggctgaacaaccccgcggtgaccagcccggagctcctcgcggtctccacgtcggctcacagcgggtacaccacctactacccgcccagttcgagctacctggacggcaacagcgccaagatcgactactacaacgtgctgctgatcaaccacgcgttccgcatgacgtcggactcgggcgagactcaggatctgatcatgtgggatcaactgaccgacgctgcgcggacggcactcgagaacacggactttggtgacgccaacgtgccattcaaggatgccaactttgagaccaaactagcgaacgcatggtacaagtaaatagctggttaatactgaaagccaacttcaacagctactcttgcatgtgcatgtagttgtagttgccgagtcctgtgaggatggaggcgaccagagctaaactttacatggcactggtccagacttcaacgcggccatcttgatgagctgtcacttgaggcaaatcggcactgcactggtgtcctatccacggtggatttcgcgtcagtgcgggaagcccaaggcaacagtcagaatcgaccgctttgctcaaacttggaggccaaaagctacctagcatatatatgtgaatttgagatgagtgccagtactcctagcctcggagtccttacaacaacactattttctcggccgaatcgacaaccttcgctttgctggagcgtgagtgatccctatttcactgttcgctttgcgaggtgttccacgcgactgattgctccttgtcgtccatcatgacatgcctacccaccgaacggctcaacgaggtgattgccccgccttttcttgcttacctcctttgactcacagattcaacaagcctttcccgcccaagaggctgcacgacctacgtgaatgctatgctgcctcaaagctttgtgctctagatcgtggagctctatcatttcccaactcgctccgtcctgcacacaacaaaacaagctcctcatctgaccatgaacctccgccctgcactcctcgctacgctggcttcattcgcgtacgtgagcgccagcgttatcaaccacgaccaggtcgtgccattcacccagccgacgcctacgaccgctctccaacaagcggccgtcaagtacaagcctcaaatccacatcagcaacggctgccacccgtaccctgccgtggacaataacggcaacacgagcggcgggttgaatcctaccggcagcgagagcgccgggtgcaagggctccggctacggcactcaaatctacggtcgcgccgtcaagtaccaaggtgtctacgccttcatgtactcgtggtacatgcccaaagacgaaaccttgaccgggctggggcaccgccacgactgggaggcgtgcgttgtctgggtcgacgacatcgctgcgtccagtccgaagatcgtcgcgctgtccgcttcagcgcacagcggatacaacaagtactacccgccgagctcctcctacttcagtggcaacagcgccaagatcgactactcgtccagctacgtggtcatcaaccacgcgctgtcggccacgtcaactgcgggcgagacgcagcctctgatcatgtgggaccagctcacggacgcggcccgcagggcactggaggacacggactttggcgacgccaacgtgccgtttaaggatgccaacttccagaccaagctcggcaacgcctactacgcttaacgttgactcaggcttttaacctgtctcgcatacttgacggacggtgcagcatttgaatgtgacgactttgtgaatctcgttcgctaatcgcgccctggtcttggcagtttgtaatgcgccaggatccatggcgttgaaccttccgttagcctcgccgtctccacgtttttggcgcttccgtgacgtcgactttgtcgttctactctacattgtagagtgcacaaacgagcagcaaatcgtacgatgtagcaaggggcaaccgtgtttttattttgtagattccgatggggaaaccaggcccgaggtgttgtttcactgaggctttgctttaccttgatgacactcttgttaggcgaaacggagactgcaagcttagtcatggggaatctaagctgtgcacgctcacagtacatgcacacgtactctgcaatgggcttcgctagtcgcgatggaggcgataacctttcgttgtgacggtgccatccttatcatcccacgcccggtctttggcggaggtgagcttcaacagctgtggcaacttcacgcccgcccgccacacggacgatatgcttggcatcaagcaccatgcagcagaatctgcctcgacggggatacaatggagctgacagtcagctccgaactgctgcgctcactatagagctcattatcgcttttgcagcgtcgccagcagtcttctcgcttcctcttcaccacggttcgcaacaccatgaacctccgcgctgttgctgctgcttcactcgccgctcttgtcggcatcgacgctgcagttatcgcccatgacgctgttgtgccgttcccgcagccaacgccaaacaccaccatccagaccgtcgctgtcaagttcaaaccccagatctacatcaacaacggatgccacccgtaccctgcagtcgatgaagacggcaacaccagcggcggcttggagcccacgggtgcaagggatctggttatggcagtcagatctacggccgcgctgtggagtacgaaggcgtctacgccttcatgtactcctggtacatgcccaaggacgagacgttggacggacagggacaccgtcacgactgggagaactgcgtcgtgtggctggactctctcgacaacccgagtattgttgcgctttccgcctcctaccacagcacgtacctgtactactaccctcccgactcggactacctggacggcaacagtgctaagatcgagtactcgacgagctgggtcatccttgaccactcgctgtcggcgacgtcgactgctggcgagacccaggacttgatcatgtgggaccaactaaccgacgcagctcgcacagcactggaagacacggacttcggtgacgccaacgtgccgttcaaggaggccaacttcgagacgaagcgtgccaatgcgtactacgcgtagaccttgcatctgcaatggtggcgtcttgagttaatgcgtcgtattcaacggagtggaggatggctgcgaatgttggagaccgtaagggaagggtaagatgatttgtcgtcgtacagcatcgacgcaagttgagtattgatgcgtcgtcgtgcagcaccgatgcaagttgagtacatgtacataatctttgatgtgtacatgtatgaagctctttgcgtattatagaagtgtgtttgttgcacgctgtggactaaagccactcgaccatcgcggcagacacgaaaaccatgtactgtacccgtagagtctagtgtcagaacgattttttctcaaagcacgcgttgagtgatccgggagtcaagaatacagtaggtaatcgccaacggggggtcgacatcgaatcctttgacttggaaagcacatcccaaactcaatccttagtaattctcgctcgaacagaaaattgaagttatcatctctgatggcgaacgtttatggctcagcttggctttgggtcgctgcggcgatttgcgttctgctcctcgaactgacttccagactggaagttccagctcttcgcttacactcgttttaccgcgcgcactatcgaaattcctctcacgagagatgaagggcagccccgcactcttcgcagccctccttgctgcatgcgcctcgcaggctcatgcgggtgccgttatcagtcacgaccaagtggcccccttcgcgcaacctgagcccgtcacgatctctgagaaggctgcggtcaagttcaagccccaactgcacatttccaacggatgtcacccgtaccccgccgtgaacgaagcaggagacaccgatggcggtctatcgaacactggggcacccagtggcaagtgcaaaggctcaggtcttggctcgcaggtctacggacgctcaggctggcacaaggatgtgtggaccatcatgtacgcgtggtacttccccaaggacatggcgtctttcgacctaggccaccgccacgactgggagcacgccgtcatttggatcgacaaccctgacgtagcagaacccaagatcttaggcgtctccgcttcgtcgcatgctggctacgaaaaggtcactaccatcccggcgggctcattgaatggtaccagtgtgctactgaactacgaaagtacgtggcctgtggatcacgaactgcgctttacgacgaagggcggagagtaccaaccgctgatcatgtggacccagttgacggatgcggccagggtgtccttgagtacgacggacttcggtagtgcgctgatgccgatgacggacttctgttcatgagtcttcgggagcgccgccaatagatgcacatggacgaggagaacgtgtggacacatccgccgatgactcggaggatccgacggcaacaggagagccggcggcagccgggctctgggtacaccaatgactggtcagggagacccatatatactgagatcaagtcaagcggaaaccgggagtaatccgtctgatgagaggcaccaacgagcacaaggagaacaagaaggaaagcaggaggggaagactagagagtagtttgagagacgataacatttaatctcacttcggaatttgccccctcaaccacaagctacaaaccaacaggttaacagccgcaacaagctcaagccctccccgacgaccgacatgacgacgtccagcaagaaggccgaagtcatcttgggaagtgacaattacttccactgggagttcgcgatgcgtatgacgctcgcgaggaaggggctgctgacgcacgtccaagtggtgaaggacccgacggagatgacggaggcctggatgctcaacgacatgaaggcgctcggtctgatcgctcaaggcgtggctgtggaacatcacacgaagattcagtcggcgacgtcggctatccaagcctggaatactctacgcgagttctacaaccggacgacgatgcataatcgggtcacgatgactcgtcggctccacgagttcaagatggaggacggtgcgacgatggcgaagcacctggacaagttcgacgagctcatcgtgggccttcagacgcttggagagccctcgatgactcccgacaactcgtcatcctgctaagcagcttgccggcggagtatgagttgatcgcatcggatttcggagctgcggcggtgaccagtgtgtatacgtcaagggcgagaagggcaggttcgtgtacgtctgcctgtacgtggacgatatgatcatcgcagccaagacgagcagcgagatccaggaagtcaaggtggcgctcaagaatgcgtttaagatgaaggagttgggcgaggccaagttcattctcggtatggatatcgaccatgactcatcggcgaagactctcatcatcaagcagactcgatacattgatgatgtggtgaagcggttcaaccagcaggacgccaaggtggtggtgaacccgtgcgagtcgggcatgaagttgtcgaagactcagtcgccgatgactcagaaggaacgtgaggaaatgcaggcgaagccctacggagcactcattggctgtttgctgtacattacaacgtgcaccagacctgatgtggcgtacatcgtgacccagttgtcgcgcttccccgagaaccccgggcagcagcactggaaggctgccatccgcgtgctcaggtacctgaagagcacccgagacatcggcatcgcctacaatgggaacgcgaagaaggtcgaggtgacggcgtacaccgacgccgactggggcagcaatctcgacgaccgacgctcggtgtcgggcatcatggtgatgattagcggggcgccggtggtctacaagtcgaagtaccagcgcacggtggcgctcagctcggcggaggccgagtacatggcgctgagcctgcgcacgcaggaggtgctgtgggcccgcgccatgctcaaggacatgggtcacgagcaagtgggagctacccaagtatgggaggacaaccagggcgcgatcgctctcgcaagcaacgctggctacaacgcgaggaccaagcacgtggacatcaagcatcacttcatccgcgagaatgtgtcctgaggactcatcatcgtcaactacgtgccgacggaagaccagctcgcggacatgctaaccaaggcgttggggacgaagaggctccagtacctgatcagcgcaagcggaatcatcgggacggtcgtgtagcattagcggcgagtgagagtgttcatgagtcttcgggagcgccgccaatagatgcacatggacgaggagaacgtgtggacacatccgccgatgactcggaggatccgacggcaacaggagagccggcggcagccgggctctgggtacaccaatgactggtcagggagacccatatatactgagatcaagtcaagcggaaaccgggagtaatccgtctgatgagaggcaccaacgtgcacaaggagaacaagaaggaaagcaggaggggaagactagagagtagtttgagagacgataacatttaatctcacttcggaatttgccccctcaaccacaagctacaaaccaacattttctggttatctggcaaactggacaaggcgtggccattttagaggcactgtgatgcgttacttagtcgaaatggaacgttacttagtgaagaaataatgaaccagcactacgttagtttataccaactctaggcgtagtacgcctttgcaacctttgtggcgaagttggcctccttgaacggcacgttggcactgccaaagtccgtgtcttccagcgcagtgcgggctgcatcagtcaattggtcccacatgatcaagtcctgggtctcgccagcagtcgacgtcgccgacagcgagtggtcaaggatgacccagctcgtcgagtactcgatcttggcactgttgccatccaggtagtctgagtcgggagggtagtacgtcagatacgtgctgtggtaggaggcggagagcgccacaatactcggatcatcgagcgagtcgagccaaacaacgcacgcctcccagtcgtggcgatggccgagtccgggtagagtctcgtccttgggcatgtaccaggagtacatgaaggcgtagaccccttcgtactccacggcgcgaccgtagatctgactgccgaggcttgacccagtgtaacccgaactctcgctgccagtaggcttgaggccgccgctggtgttaccgtcttcgtcgacggccgggtatgggtggcacccgttggcgatgtagatctgcggcttgaacttgaccgcaagcgtctgtagcgtcgtggtgggggtcggttgcgcgaagggaacgactgtatcgtggtctatcactgctccactcacgagtgcgagtgagccgacagtggtggcaacgatagcacgaaggttcatcgcaagaggatttctagacgctcacgtggacggtgttgctgccgtagcaggttgagatgtgaccgtcgtaagagatcaccacgactagccaacgatcacgaggatgttcgttggagatggcgagcgtgggagctcgaaagacaggtccagaacgggaatcctgtacccaaccacggtcaagcagcgtcttcggctcgcaccatatcgtcgcctgcattgtgattccagccttaccgtcgagatcaagctcttggggcatcaaccgaggcaggtttggattgcgggccgccctggggtccagcgtctgggcgccgcctagacaaccgtgcgacttattcgtgcaacaaatgcctcgtcgtaccacgctcgtggacaaatatttttcatttcgtgactagcgaccgtatcctaatggctcttgctcgatcacctcacgagcagtgtgtcggttaataacttccgcctcaacctgtttctgctgagcgggtgtcgacggcaggtgtacttaagtacgtagcgcctgtcctcgcggtctgctcagagcaactcgctcggtgctcaaactcgctcaggtggcgactggatccatcatctctgatgcacaactttgtttggttactcagcttgtaggcttagactgtttaagcatattcagtattaataaattgtactgccataagctgcgcaggacttgcagcaagtcaaacgttgcttgttcgagtcggacatgacccaaggtacatcggataccgtggttcaaggtgtatccgatcccatgaatcatttccgatatgtaccgtatccaatcgaagcttcaaggtcgaagacaagtgtacttgtacctgaaattcaggtcctgaattcacgcaagaagcgctggatcccaaatgcaggaagtgtagtgccttgaatcaatgaaaaatcaacacatgaagtagtactacagtatagattcatgcgtccatgaagttgctactcaaacacgctgctctgtgggtaaatagcacaccaaaatatgcgtatccaagctgtatttcaaactctgattactggggacgggagcgagtaccaggcccgctgaatatgaccacgtgcggaggagaggaggctcgacgcctttataaggggccgcggagcttacggcttggtcgtaatggggcacggcgtcgtagccgaaggcgtcgtcgtctccggcagcgacgtcaccgacgtcgggcacggagtggtggcctcaggggtggtggtctcgggcagcgaggtcacagggcacggcgtcgtggcagcaggcgtagcagccggctccgtcgtgtcgggaagcgacgtagccgggcaaggcgtcgtcgaggcaggagtcgaggtcggggcctcagtctcaggcagggacgttactgggcacggcgtcgtggcagcaggggtagaggtgggcgcatccgtctccggcagcgacgtcacggggcacggcgtggccgtcggcgcttccgtgtccggaagagaagttaccgggcacggcgtggtcgtcggggcctccgtgtctggcaacgaagtcaccgggcaaggcgtgtcaggcaaagaggtcacggggcaaggcgtgtccggcaggctcgtcactgggcacggggtgtccggcagcgaggtcactgggcatggagtgtccggaagggaagtcaccgggcacggagtgtcgggcagcgaggtaaccgggcacggggtgtcgggaagcgaagtcacagggcacggagtgtccgggagcgaagtcacggggcacggggtgtccggcagcgaagtcactgggcagggcgtgtcgggcaagctcgtcactgggcacggggtgtccggcaggctggtaacggggcacggggtgctggaggtgccgcagccgaccgacggaagaacgcagccccaggtgtcgccgttgacaatggtgcactcggcgtcttcgggcgcgacgcaggcgctgccgttccaggacggcaggtagtcgtggcagtcggcgatggccacgtcgcccttgagcgggcaggcggtgccggctggagacgcgccggcgcccgagcacatggcgccgcgcgaggcgagcgagttgtaggtggcatcgcggcacaccgacaccggcaggtcttccaggccggcaacggcggccacggccacggcggcgcacacgagcgcggcgaaggtcttcatactttccgtagtcgaacgagtagtgatcgggctccgaaaagttggcgctgctgctgaatgaggctgagcgcgaacgtgagctgggtgtcgaatacgacggcaaattcgaaagtgcgcggccgcaggtgaggtgcagcctgcagactacatcatgagcctggttccctcgcggcctgggcgcgactgctctggccgcacagttgtccatgtggacagagaacggacatccacatccaaaaaccgacatagacgggtccatctgtcaacgaggcaaacgggacaagatacacccgccatagaattttcaagtgagctcttgccatgcacggccagatcgcgtttgcaactgcgccgcgcccgcaacctgctccgcctcgacggaaactgcggcgcccaacgctgtgtcacttggtgaaatgcctgccgccgcgcgaccagcttggtggcgggtctggtgcttggtctgaggtgagccagaggtctgggcgcagtgcgctccgggtcgaggatcgcgctggcacttgcgaaaaggcctggtggccgccaggtcctctgcgaggatgaaggcctgcccacgctgtgggtacagtatgtacacacgtagattttggtgcgacagcgagcgatgagagagatcctgaactcttgcccgccaatcggccgcgagccgcagttgcaggctgctgggttttgttgaacgtttttccgacggatggacttcgcgtcatgcgttgaagacattttcatggcatttcattctcacccggcagaaacacgccgcgatcgatgtgagctcgggttgatctaactgacagactgacctgcggactcaacaccgcagggccaactcggcagtcttcgggcgtgcgctgaaatgtactggtacctcgccgtcgtacctgtacatgtgcaacctttccgccgcactcttcgcactgcgaagttcgcaggaagatctctatgctaggtaggtgcaacggcggcacgatgctcacaccagcacaggtgtcttcacttcaggtcctcacttcacatgaaaacttgggagaacttggcacacaggcactcgccctttgacagtatacgctactacaagtagcgcagcgccattgcttacaagcccgaccgtgtgaatgccgccctaacttgttgccactgcagagctgactaggtactacctagtaggtaggtggtaagcttaggtgagacttttggaagcagcgacagtgagttatcccggtgtttgcaaaatatccgcggaaaatccgatggacgggctacgtttgtttcacgttgaagttgacgcgacaaaggcaactttatgacacacgtcaagctctgccaaactttgctcggggcgcccacttccctgctgaagtccctcggtcccggccacagccatcgagcttgcacattctcaatcgatgactcatgctcatggatgctaatgttgtcgagagcgggtctacagcctagagtcaatcattgcccagttgcgagttccgaggcaacccttccaaggactgctattacaccagtcaacagcgttgagcgtggttgctgagtttgccggagatacagcggctttcaccggcatgtgtcggtgcggcatactgtttaacggctgactcgggtcccacggtggtcacttcccgctgaatggcctccgtctccctcggccacttcaacgagagattgcgctgtgcaactcgcacggcaagttctcgtcggaaaagctttgcccgcgcgtcaactcttgcgtcaacgatcagcaagggagggctgattcaactctccttcacctcccggctttcgccgtcgttctgcagtacatgtagatggaccaggctgtgctgggtgcccttggcgagggaggtgcttccctccttccttgctgagccggtctttgttgcagtcgaacagcgtgaggtccgcactcgcttggccgctcctgcccgatcgaatccgctccaaaccgatctgttcactattcaatttgccttccaagcgacaaatccaagccaagcttcaagctcccacccccacgccaaactccacgatgaagtccttcgttgccgccgttgccgccctcaccgcgctcacgtcccaggcctccgccgctacctgcggcagcgccgtgctctcggccctgctcacgaaccagtatattgaccagtgcgcgtcggactctggctacgtcttcacggccgccaccaagcccaaccaggagacggtcgacaagatgtgcgcctccgccgcctgcaagggcctgctcgccgacgcgcagggcatggacctgacggagtgcacgctgccggtcggtgacaacatcaacctgatggccgacctgatcgactacgtgccggctcactgcccgtcgaccgaggcgcccagcaccgagaccacggacgcccccgccgcgactacagcccccacgtcgtcggcgaccgacgcgccgaccgtcaccacggccccttcgacgggcgagtcgaccccggccactgctgccccgaccaaggcggctgccacctcttgctaagcgctcctcgccggatcgactcgcagccagccgagtactttgctgcctttttgagctccgtcttcgcctcgccccagttatgaaggttgtttaggcttgcatgtcgtagtcactaggaagacccgggtcgttgtgtatgagcgaacgcgttaatcctaagaatgaactacttactcactttgtgaaccgtaaaaatgttggcagattttgccttttccacttgggttttgtagacaaggattgacaccacggccatgatctcgaacaccgcaaaaaagcgccgtctaccgggccatgccataaaatactacagtaagcatttcttgcggatgatttcggtgtccagcgggtcaaaagatctgtcgggagcggcccacgacgttgaaggcgttgaagacgccaacgaggacatgcgacctggacgtcgcacttggcagctcctaacgatccttgcagctctttccactcccgacttcgctccatcaggtccgcacgtcgaattgacccgcccgaggtgacaagaggtgatcttgagaccttcctggctgccggccgaggatcgatttttggccgctcagctcatttatcacttttcaatttgccttcccagcgacaaatcctcctcctcctccaccacccccactactcaagtccttcgccgttgccttcgccgccatcgtgtcgaccgtctctgccgccagcagcagcggctcgtacgccgactgctcctcgtcggtgctctcggcgctgctgacggaccagtacatcgaccagtgcgccaccgactcgggctacgtgttcacggccgccagcatcccgaccaggccacgatcgacaagatgtgcgcttcctccgcctgccagaacctgctcgcggacgtgaaggccatggacctttcggagtgtgtcatccccgtgggcgacaacatcctgctgctggccgacctagtggactacgtgcctgagcactgcccatcgtcctcctcgggatcgaccacgagcagcacgtcgacagccacgactgcccccacgactaccactacgacgtcgtctgctagcagcagcaccactgccacggagaccccttcgacgacgacggctactacctcgagcaccagctcgacggcgacctcgactaccagcacgactgctgctacttcgtgctaagcgacccgaggggcaacgagttaagcttggctcaactcgcgggcccgagaactcgctacgggcgagatatcaccatgtccatcttcacttttgcgtcaagattttccagggtgcttcagcgcgtataactactgtagctagcaagtaggttggctcccagtatttgctgttgtaactgtctgaaaatacacttgggcttttagctaagctctggtctactttcttgtagcttttctacactagcgcgaatgatgctcagaatccaattactactgcagtaggtatgacgccgcagtgggcaaagtagagctaatagcgaccgttgctgttgcgcgctaatagttaaactgacgacagtgctaggatagtcgggactatcgtgtcaagaccattatttgtaaatacaggttccagattgttgcctgtaggaatctatctatggaggagttcctctgtttgtagtccgcaatggtttgttcggccaccacttactgtagtgcggaagactgaagacactacaaccggtagcctctccagtcaaggcttgactgacgcgaccgagtcacaaacaatgtccgcggcatgtttccgggcaagaaagcgagagcttcgatcagaccgccggtccaaccttggcgggatggtcttcaacgtgttgaagcaggcgtgaacactgttcactgaacaggtcagcatggcatgtgcaaatccgctgcgagtactatactggaactttgtatggggctttggattttatccagaaaatatccaagattccgccgttatgcaactcttgagcgagtcatcacaaattgaaccactctgaacgccagaccggattttaacgtgggccgctttcccgcgggatgacacgttcgcgactggatgcgatctttgggtgtatgtaggccagccaccagtacatgtaggcagcgagtcgcagcattctcgtggatgaccccctggctcaagtgcgggtgtacatgtacctcaatcacgtgtacctaagctgtgagagggcccgcgatcgccctactgtagtgacctatagacgagctacatgtacagcttggcgttggtgcgttctcgcaactgttttgactattaggacaggtgagtgcattatcccctcggtggctctgttcagcagcgttgcttgtcttacaaaagtgttactacaggataggaccaggtcgctgcgggctcgcaccgccgtgtcacgcgcgcgatccagactgctacacgtgtacagatctcacttccgagactgctaataacagatgacctccattatttttggtactttcaaatattaggtttagtagggaagtttcgcgcgcgcgcgaaatgcactcctgcacgattcgtttggtaccagacaatgagcgccaatcgagcatttgctgcggacggagcacgccaacaagcatggccaagcggacaccataacaaagaagacctacgaccaaggtaagcgtcgcaagcctctcaaggtggaggcgaaggctggatcgagaaagcagagcagcgcgtgtgcattgagatcgaaaggtcgtcacgaggagagctaacaagctgcgcttggaggtgggggggcacgctgaacgagggcgtgtctacaagttggctggtaatgtttctaagcaggtatgagcttcgcatttgtctaagacgtcgggaagcgactcaagcaacgcagtagcgccagaagctggggtagacgacgcgcgcgacgcgctctgctgccagaagatgatccaaacagtatccttaagtagtcttaacgagtctggtgaggtcgacgaaggcgcacaaaccgggggcctagacgaagacgtacatgtagttgccgacatgcttattgtggcatcgacccaagtagaggtcgcttcccctgcagcaaattatacagtgcacaaaaggtacatgtacctaacatatggtgtcggaagtggcggtatattctgtactcagatgtgagcgaggcgtgacaaagctggtcgggcgtcgcactcattcctgctccagcgttgaagccccgcacacggtgcgactccaacttctgttcgtgaacactgttaagcgagcttcaagcaggtggtgagatgggcgcactcgatcacgtggcgtcggaaagacaccaagcttgacacgaacgggccggaaaacgcgtaagattttcaatcaggacgataacaaactgcaactcgtgtgccgctagcaatgtcactcgcctttgcagtcagctctgccgtgcagaacgcatcttcaatggttgaccatgacacaacgtacttgtgcatgcgcagccacttcaactgagcgggtttgctatcttgtttgctgttgcctagctgcccttctcgacggacccaatctcgtcgttgaggctcacgttagtcgcttctttttgccttcttgcttcaaatattttgttcgttgcctcgccctcgtctccccagcgcgcaagcgctgcatgcagccttacttctcactgccattttgtgctcgatcacttgtcaattttcttggtgctgcaacgagcaggggcccccagcagctacaaaggttctccgcctggagatgaagctccttctcatcggcgcggtggctgccgcgctggctcagtcgacctcggcggcatcatgcgcgatctcgacgctctccaatctgcttacgaaccagtacatcgaccaatgctccgcagactccggatacgtcttcacgacgggtgtcaagcccgtcccggcagaggtggctggtatgtgcgcgtcggacgcgtgccacagtctcctggctgacgtggtggccatggacctgaccgactgcacgctgcctattggcgacaagatctacttgttcgccgacttggtcgactacgtgtcagaccagtgcgaggacgaggagattcccgttccaaccaccgccacgccccagccgacgacggcggcaccaactccggcacccactgcaactaccccggcaccgacgacagccatcgcttcatgcacttcaacccagctgaagtatctgctgactagtacctacgagaagcagtgcattgccgacacgggctatccattcacttcaccgtattcgcccaccgatgcccaagttgccgccatgtgtgcatccgagtcatgcgtcaatctctttgcttacgtcgggtcaatggtgacaaccgactgtcggattccagtaggcggtaagattcttcttcttgccgacttagtatactatgtctcggaccaatgcagtccgttgaccactgtaccgaccacgacaaccccggcatcaacgaccgcagcaccggcaacgccgacagcgacaacggcgacgcccgtggcggcgtgcgccaccaagaccattacggcgctgctcacggacagctacatcgaccagtgcgcctccgactcggggtacgcgttcacgtccggcgtgcagcccgacgcggaggaggtcgccggcatgtgcgcgtcgagcgcgtgtgccaacctgcttgccgatgtggaggcgatgggtctgtcggagtgctcgctgccgatcggaaacaagatctacctgttccgagacctcgtggactacgtgtcggaccagtgcagcgggtcaaccaccactgcaccctcgacaacaacgacggccccggcaaccgcagcaccgacaacaacgaccccggcatcaacgaccgtagcaccgactaccgagacgaccgcaccggcagcggagccgcccgtgacctcagcgtctgggtctggttcgttaaatggcgaatctcctagtactgatgctccaagtactaattcttcgagcgccgcatcatcagcgactggttcttctgctacgtcgacgtctggctcggagtcgtctagtgccgaattaccaagtaccagcactcccgagacggaatctcccagcacgagctccccgtcaacaccgagttcatccaccaattcttcgacaaccgacgacaccccagagccaacagcaccgacgcacgaagcgtgctaaggcagcgtcgactgagaaatgatgcataccagcctccaaacctgagtcagtcattccagggataacacaaaaaacaattgagttttgtctgcactgcacgacactgcgcgtcactcttcagttctttggtatcgccttccactttgagtcaggcaacatgagggacttgtcgaacaggagagcgacgtcgtccagactccctaagagcgccagcatcggtgtcagcatgtcggactgggccagcgcgctcgtcacgcggttgcagtcgccgtcccaaccaaaaatcgttgacccgtacaaaacaatctgttggccaagtatcctgtccgcaatcaacgccttcttggctccagcggctccgtcttcgtcgctacgtagatgcggaaacacgtagcgcagcgtttggtcggtgatagtgatgctcgccttggtggacgctaccaccgagtctcctggacccttgagcaacgccaggagctccacatccacgtcatcgaaccagcgcgcgcggcctttccagctcttgagcatcgtctcagcgccgcgccctccattgacctccacattctgagccatggttgcgcgcatgaagtctagctggacacaggaactcgtagtcaacggtgagtctgggacaccataccggaacagtcggaagtactccaccgccacaccccagacgttagcttccctgggcgtaacttggagcggggtgatgctgacgcggctctgctccagtcctgcgatctcttctcgaaccttgcgattgtcttccaccagcctcgccaagaactcgttttgcctctccctgtagcgcgtctggttgattcggtggcgttctcgctggtaaactaaccaggaagctgcgtctcgcttgtccatgtaatgggcctactttggctcactactttagcttacacgtgtgcgcgtgtatgtgaggaagcgtagcttagtttaaattagttaattatactcgggcctccgagtatagattaatctaaataaacgatccaaataatgtttttgggttaaaatgagaactgctatttttgttttatgtttctgacttcctctaaatgtaatatctaagataggaatctgccaacggctggttggcagaattccaatgctatgcatgtcactcattggctaagagatgctgctctcagccaataggaaccctaagtctctatggaccacccgtcgtggtggtcgtaaatgtatgtagcctttggtgtgtctacaccaaggtcgagaaagtctttcaaacctctaacaaacgtcgtatctgttagagttacaagtgactgtagccacttgtgcgtgtaaccctgttacaccatcccccccctcaaggttagacgcgccgagtcacggcacgtcaatcaggaactgaccattcgtcaattcttcacgttgggagaaagaaaactcgagctcattccgcaatgagctcgccgcagaagaagaccgccgccgcaacagagggtaacctctctgttgctcagtaccatgagcgccagcaggcaaagcgcgatgcgctcgctgcaaaggccgtgtcggggacaacccagtcggagattgtcctcgaaggttcctctgtagtcaacgacgccgttgactacgaagacgatgacgtggagatggaagatcttctagcaagcgcaaggagtctatcgacagcgatagtctcgacccgcatgccgggtcgagacgccctcgtgaaggagacgactcggacgcttcgagctcgaagcgttcgcgcggcgagagcgacactccgctctctgctgctggggctttaagctccccgcgtgaggtggcgtcttcaagttctccgcgcgctgctcaggcagcgcgcgatccgtggatgccgtctgcgtcagagatcgcagaccgtgtgggcaacaccgtgcctccaaacgaaatcccgctgtacgtatgcagcggcatccacgacgatgctgtggcggaggagcagcactttgatccgttaacgaatcaaaggcgcgattattacatcgggctcttccacgagctccggtacttctccagcaagaagacctcttctcgcagcaaagtgcctgagtggcaggcactttgtcaaagttggaatgcttttgttgagaacttcaacaagaaaccggctgcttaccgcgagcgggttaagcatgcccgtgaacgcttcgagacattctcgacgcgcgggaggttggagcagctccatagatcttctgtggacgctggtattccatgcgctgcgcccgaaggccaacagtgcacgttgtgtcttccgggtgcggcgcgcttgagcgaccgcgacctaaacgggtacacgatgattcgtgtacctgcgagtctcaaggatctccgtgccaagttcttggcacgtgaggaacgcgacgatcgtggggcctcgggcgctgtaggtgaccacagcgctcgcactaccttcgcgtcggcagtgcgtgatgagcttcgtactccctcaccatttccggaacgtcctgcagcaggacgtcccgtggctcccatgtatcttggtggggcggaaaccctctccaacgaatacgataacgaaccggcagccggttcgttttcgggatactatggttcacaatacgctcaacaatccagcgtgttgagccgcgggcgtcgcggatcagaggcggcggtggtgggaacacgccccgggtatggtcaacctggggttgaccttggcccgacactcgaggagcgggtcgctgctgtggagcagcttcagagccgtgagttcgccgctctgaagcaggagatggcgaccctgagagctcaagttgctcaggcctcgcagaccgcgtcggacatctctgtcgacgtgggaggtcgcgtcgcacgcttggcccagcgcgttcacgcgctggagcagaggttcgctcccgctggggcttccgcttcgggccagccgagctaggtggctcgtgctgccggtatggcttcagccgcctgacgtaaaaggtcggatggaggcgcatgctagatggaatatctagcgtgtaggcgttgccatgccgtgccaacaccgtgaacggcccgatgaagcacggagcgagcttgctcgccccgaagtcggaaactgcatgtttaggcaggttttgagttgttaacaaatccaatgaacccttcttgaattcattagtgttgcccctaccaacattgtctgcggtcagcttctgtcggtcgacagaagctgcgatagcgtcttggacaaaccgaatgacggcttgtctgcgctgcacgaagttgattgcgtccgagctgaactcgttcagctcgtttctcgcagtaggcccggcctctgcgttcgtcttcgcggtgtctgtgccctgcacagacccgttcttcttcttctttttgctcttgtcggcgtctgtgccctgcacagacgcgttcttcttcttcttgttgcgcgtagtcgcggctgacactgcgcaagtgtcagcggcattctgcggctgctgtgttgcagtcgtagatcctcccccacttaagaaaggagccaccatcccgagtagactcgggaggcgtgggtgcctgatggcattcacgtagaacggtgtatgcccggtcgaggcatgcaccgagttgttgatggcgaactccgccatcggcaggcactcgctccagtgttggaacgagtgagcgtagctcttgagcacgtctacgagcacgcagttcacgcgctcggtctgcccgtccgtctgcggatggtccgcagtcgacatcgaaagttgactcccaagaagtgtaaacacttcttgccaaaggtgtgcagtgaagcgcgggtctcgatccgacacaatgtcgatcggcatgccatggtgtttgaacaccatgtcaacgaacagtcgcgccgtctgtttcgcagtcacttcagcgggtactgcagcaagatgtaccatcttgctgaagcggtcaacaaagaccacaacgcccgtgttcccgtggctgtccgggggaagaccgaacacgaagtccaaagacatggactgccaacactcccgtggagttggtagtggctgcaagggagcctgcgcgaaaggcgcaggcttcacacgttgacaaacctcgcaagcacggacgtacttgcacacccatttatactggtgggcccagtagaagtctcgcgtgagaagaaggtatgtcttctcacggcccggatgccccgcagtcggtgcatcgtgatactcatacatgatcctgagtcgcaggtcatggtcattgggcacgacaacgcggaccgcgttgtcgtcgactgcactgtagagtaataacccgtcgtgcacccgataacggtgtgcacgagcacgaagatgcttcggcagcttctgacgagctttgtcagaaggcgctgagccgtaggccagcaagagctttgcgtccgcgtcgtgcgcgaacgcgaccttcacgtcgtccaacagtgacgacgttggggtactcgatcgcatggcgtcaatggcattgacgtcggcatcagtcgtggcgtagtccggtcgacgcgagagcgcgtcggccaccacattgagtcttccgggtttgtactcaacccggaagttatactctgcgaagaatgagagccatctcgccatccgttgcgagatgtgcggcgtcttcacagccgtccgcaacgacgcgtggtccgtatagaccacgaacggtttgcttccgagtagatacactcggaacttcgcgagtgcgtacttcatggcaaggagctccttatcatgtaccgggtagttgcgctcagctggcttcagctgacgcgattggtagtagacgacacgatcacgaccctcgtgatcgtgctgcatcaacgcacatccgattgcgaagtcggatgcgtcacacacaacgtggaatgggcgatcttggtcggccaccgccaagatcggcgcctcagtcaagccccgcttgactgcatcgaaggcctgctgacactcagcagtcccaacccactcggcgtccttcttcaggagctgtgacagcgggcgtatcatgcccgcgtagtccttcacgtacttgcacaagtacgtggccaagccaaggaactgccgcagttccttgacgttcgacggcgtcggccactcattgatcactctgaccttctcagggtcagggcggacaccgttcttcccaacgagacactcgagcacgggtatctcgctcgcctcgaagatacacttcttcaggttcgcatagagcttgtgcttgcgcatgagcgcaagcagcttccggagatgcaccttgtgcatctcaacatcgctcatcccgtccgcagcccggctgtggacgaacacatcgtcgaagtagctcggtgcgaagtcgcgcaccgagcgcaacaagtgcgtcacgcacctgttgaaggtcgcaggggcgttcttcagaccgtgcggcatcactagcccctcccagagcatgccgctcggcgtgctcactgccgtgaaagggatatcgctctcacgcatggggatctgatagaacccatcgcgcagatcaagagcactgtagatagtgctcctggccatcgaatcgatgataacatcttttcgaggtatcggcgtctgcgccggtatcgtcgcatcgttcagcttgttatacgcatgaacgatgcgccagccgccctgtggcttcttgacacagaacgtcggagcactgtgcggggatttcgattcccgcacttgtccagctttgcgacgactttcgaagaagtcgtcgatcgctttgacctgctctcgcgacagtggccactgccgcgtgacacagtacttcgtgcccggcacgagatcaatctcgtgctggattcccttgtcctgtggaagctccgcaggaatctcttccggaagtacgtccgcgtactcccgtaagatctcgtagtagggactcgttttcaacgagtcccagctctgctcttcaaagcgctccttcttcgtcttcgcactgagagtgtcctcgctctcagtggtggtctccatgaagaactgcctcagttcttcattctcgctcttcgttctctcggcgtccgagagaatgcatatttgctcgatgcgtccatcgtgcaagtcacgcgcgaagcgcttccagctcaggactggaagcgaagtcaactccaacgcttgcgtcggagggttagcgagagtcatctccctgtaccggaaccttgcacaggtacgcgtcaagacgttcaacgtctcaacgtccggcttctcagcctccgtctgcccggcagacattccttgtagcgtctcggccccaggccgagacttgcgcagcgacctccgtcttcttgttttgcggagcccggctccgcttgggtcttgacctcgtccaggcccagccgtggacgggtgttcttctttagtaccgccggcgggttcatcccgcgggcgagcgacttcaagcccggcttggtcgcccggcgcttcgtcgtgcagccgggctgcacgacagcatgcaagtttttccggtgcgggacgtttacaaccgtccgcaccgcctgcagcgtcggctcccggagccgacacgccatcttcacctcgacgcctgttattggcggagccctccattacggagggtgcgtcggctccccgagccgacgaatcaaattcacccaagccatcgactcccggagtcgacggcgttacgtcaccttggctcttattattagccagacctgatccaatcagattcgcgtcagcctccacggctgaggcgtgtgactcgtccgcgtcatccatgccccttgaggtcggagactcttcctgattcgctgaaaagcgggtgtcgatctccgagatcaacacattttctccttcagccgtcgggggcgacgccgacgcttgctactcttgcgcgcgtgctcgcgcgcgaccagggcgttccgggacagcggcattaggcgctgtctcgagtggggagtcgcgcgcacctgtcggtgcgtgcgtagcggcaacagggccatcgctcactgttccgctgtcgcgaccgaagcgcacgagagtgcgcttctcccaatcgatgaccggatcatgtcgtgcaagccacggcatgcccaatacaatgtcaaacttatcgcccagatccaggacgataaaggtctcgacaaactcttgatcttcatacgtgaagcgcacgcgtaccatgcgcttctcggccttcacgacggcacccgttgccagccgtacttccaacatacttcgaggtatctttaaatcctcgaagtcaagccttgatagacttcgcagtcgaacaaagttcttcgacgcgccagaatctaccaagcacggagagagccgcttgctctcatcgaggttacattcaggatgacaaggtcagacttgtcatcttggttcttgcagttagaatgaacctcactgggggctgcagtcctcagtgtcgcgtgtccaaggtcgacacgcggaactgcattaccagtagggcgccccgcgcctactggcgtccagcgttttttgtttggttgcgacggtgcccggcaccgccgcgatagccaccctgctgatgcacgggggccgtgcactcccgagcaaagtgaccgattctaccgcatcggtagcatcgcacattgtttccttgcaactgctggggtccagtagttgcagcactcgagaggtccatgggttctgggcctcccgtccgcactaccgggcgtggctgtggcctcggcacatgtgcatgcagcttagccagcctgagagatgggctatctcttccgtgagtacccgagtactctcgaagtactcgggtactcacggaagagataggtctttacaggcccatctctcagccccttcatgaacgtgacgaccttggtcgcctcgtcgatcggattggccacgatgttcgagaccaagtaccgtgctctctgagcgtaagcatggacatcatgcttgccctgctgcaggtcgaggaactccgccctcgaccggagctcgttttgcggtggctcaacgcttgtctgagctcttccttgaagccctcgtacgtgctaaagcacgtaggatccgagagtcggcgtccatacgcccaacttcttgcacgtccgccaagacatgacatggcgaacgcgaccttcgacaacggttcgacgatgcgtcgagccgcaatggcagtgtcgagttcgacaagccaacggaggagaggctcaccctctcttccaacgtaattgctcacgctgagcttcagcgattgcgcgcgcggtgtcgtccccgacgacaccgtggtagacgaagcagcatctcgctgctccctcatgatgaatcccagagcaacaccatgttgctctgtcggcgttagcgtacgcaccatcgtagctacagccgcctcaccaatgactgttgacagtcgttggagagcttcccactctgggtccgacaggtggggacagtcagcgcgtacaacgtgagttgcgggcgtagtggagctttccatggacacctccgtatccatgggaaggttcccagctccgcgttcgtgcggtgacgtacgaactcaggtagtcggtcgttggacggactacaaagtgctaccaggtgtaatgggcctactttggctcactactttagttacacgtgtgcgcgtgtatgtgaggaagcgtagcttagtttaaattagttaattatactcgggcctccgagtatagattaatctaaataaatgatccaaataatgtttttgggttaaaatgagaactgctatttttgttttatgtttctgacttcctctaaatgtaatatctaagataggaatctgccaacggctggttggcagaattccaatgctatgcatgtcactcattggctaagagatgctgctctcagccaataggaaccctaagtctctatggaccacccgtcgtggtggtcgtaaatgtatgtagcctttggtgtgtctacaccaaggtcgagaaagtctttcgaacctctaacagacgtcgtatctgttagagttacaagtgactgtagccacttgtgcgtgtaaccctgttccagtccacgcctgtatgcgccgccccgcctcgcttgggaaggctccgctcgtctctgcttctcttcctgtctggtagtcgcagccccgctggtacttgaacgccctcatcagactttgtatcgctgccggtgggggacgatagtgaaagtaagataaatatcttaaggattggcatagccggtgctaatttggattcagcctacgatattcaaagtgttacggttcatccgcatacgaattagctagaaacgaatgtcagtgaaagaattatatatcactaatcgtgataaaagttttgactagctctgtaactttgcttaatcggtagggcttacgtatttatattggcgccgctttacttaaattaagtatgtaatttattaacatagcctatgatactagggctccgcgaaggctgggataggaggtttttgggataaacctttttattagttgttttgttacgatccacggtcatctcctgcgcctgcttcgcagccgcagcatctgcccggtaattcatctcaacggcgaagatgcaagatacgacttggcagtaattatacacagtaatgaaaagaaccttgctcgagatctgcttatagctagtagagaaatgaaaatacttgccagtgtatgctactagggtagtccgtccgcttcaatcattcgctttacttcactccatatatgttactgactcataccggttcaaactgcccacgcatataaaccttttggaggcccagtggggcaccggggccataccggtgtgatgggtagcctaccgattcgatctgcccagtcaagaggggtcatcgtttgacttgacgtaccacggatataatcctatttggtctgcgatagcagcactaacgttgcttcctatcccagtaaaactgctcctaaacttacattcttctgtagcatcgcctacagaccaacggcctcttccagttcgcggtcagctcgccgtccgtttgagcttaaatgctacttgccaataccaccaatttcggaaatttgacaatatttgtgatgagtggggatggtttgggggtcgatccattaccggagaaacacgcttccacctgggtatgttcctgtttttttggggtctgagtgagctcgatgagtgagctcgatgcttatcaagccacataattatctgaaaatagcttgccaacatgaattcacctcagaaaaccatagtatttttgtgggggatgggaacgggtcttaacaggggtatagtgggggaaatggtccccatttcccccaattagggaggcctggcccatgagtcgtcaggcctgtaagtttaggcttactaccagtacagtactcggcggcatcgatcgaaatcggcgtctcgtgtgcatcgatcgaccttggccattcaaggagcccaccaatgaaccatagaagcagacggtgttgtgtattactgtaataaccccacttagatttgtcctaggagataggaccaaatcgtgttttggtgtggcacacaccgccgtttttgtcctagggagcccgaaaaaggaccaaaatgacttgatatttgtatgggatgtttttgacccccccaaaggtgtgtcttataaggcgcatcgggcagggaaatcggcgctaaagatagctccagctgagaccatactgaaatcaagtcaaatttgtcctaggctaggacaaatcggcaaaattcgatgttagagcctgttcgctacgtagctggagatagagacgaaaaccaaaagtgtgaccggattggtcaaaagtaggtagcacacaacaagacaactagagatggcactgtgaattcgtctccagctctttgaggtggagaggggcggatctacctagagatttacagggccaggcacaacatgggagacgaagatgcaattgtcctcgctgcgtgctccgccgtggcacaggctgtggctttgtatgcagacagttgcgaaccaggacctcctgctggcaagaagaaccgttttaccgtcaccactctgcgcttcgagtcgatgcttcaatcatcagcctattcaagctggttcgagaccaatctgcgctgtacgagatccaccttcttccgtatagctagctttctacaagatcatggggtcgctttcgcacaagctaaggtcaagtagcattcctacgaaaagaaggtggcagcggcgctgtatttcctgggctcagcgggtggatatcgcgaggtgggagctgcaatgggcatggctagaagctacgtcatggagatcactacggaggtagacgttagaagctcctttcggacgagacttgcctcgaccctgtgctgcttgcggtgcggccgaggcttgcagacgctcgagcatgcgagatggagcgggagtaggctctggcgtagcagacatcgccactgatacttgagctagcggaacaaatgtggacgcagtctcggcgccttctagcagcagaccttcatcaccggcagatggtgtcagcgagacgaggggctcggacgctggcgtttcgtcatgacgtgcggggggcgctagaaccgaagagccttgagcagcggcatgtgccgcacgcgtggccgcactggtgaggcgagtcggcattttctcaagtggggaggagagccatcccatatctgtcctgtgattggcttaaaatttgtctggagatggatacatagcgaacgagctgtaggtggagatcaagcaccatctccatctctagtacaacgcgaacaggctcttacaagagacaagttttcaacggcttatatctcgagaaggacaatggaggacgctaaaccgataagaccaccaggacagctaggacgggggattgtgcccatgtagtcacatgatcctatttgtttctagttatacggagcgaggcgcctaacttttggtccttccatttgtcctacggattgggctaagtggggataagagcgcgcagctttctcctcagtattggcgctatcgaacagcgtgcgaggcgagtattttcttgtcattctcctttgctgtcccgcttaaagtgtccttctactttaatgaccgtaaaagatcactaaggaggtcactttccgtcggacacccatccacccatgttgaactcacaccacatccttccaagaagccaaagcagtccgcagccttccaagcgcctcaacatgcgcgtcactgacgtcgccgcaggcggcggcgctgccccaccgcccaccgcccaagccgcagctcctcccccgcaggcccaagacgcgcgcccagccgcagcatctactgcaacagcagcaactgaagcctcgggcctctccgccgccgtcctaaggggctgcgtggggggcttctaccgcgccgtggagcgcgtgaccaacactctgagcgacgtggagctggcgccgccccaggtcgtggtcgtggggcaggcaagtcgagcgtgctggagagtgtagccatgttgccattgttccctcgcgatagcgtcatgtgcacgcggctgccggtgctgctcaagctccggcacatgtcgcagagcgacgttgaagtggccggcgacccggagctcatgccgcactgcagcgcgccgccgcgcgcggagcagatccagatgcacctgctgtacgcggacggccgcgcgcccgtggcctcgagcgcgggcttcacgcgcgcgcaggcggcgcagctcatgcgccagtggatggaccagatcgtggccgagcagcacgcggaccggcagctccgcggcgtcgtggagcacgtgctggagatcgaggtggcgtcgccccacgtgcccaatctgaacctattggacctcccggggatcgtggcgggcaagctcattgacgagccggacgacatgatgcagcgcacgcgcgccatagtggagaaatatctgcagctgccccacacgctcgtgctggccgtcgtgccggcgtccgagcgcgtgcgcaactctcaagcctttcaattggtgcagcagtacaatctaatggacaagaccattggcgtgctgacgatggtggaccgcgcgctggatgacacgaacccggacggaccgctggccgaggtgaagagccgcctggacggtacgtcgagtgacattgtgttcttgaagcagggttacgtagctgtgaagaaccgcgactcgcgagccaagacggagatgtcactggaggaggccaaggcggaggagaacgcctggctggaggagaatctgccggggtatattggccgaggactggcctccagctcggtgttggtcatgaagattgagaaaatgttggcggagcatgtacgtacgcagtgggtgcctaaagcacaggcgaagatcgagacggaacgcaagcgcgcggagaagaagctggcgagtatgggacccgaccctcaagatattgtgaacgactttcttggggtgtacccgactgctgcgaggaagagggtgctggagctggttaagcctgttctgccggccttgatgagccaggttgacgaggaaatattgcggctcgcggcacttgttcacgcagatttcctcaagtcgcgtgaagaacatgaactgatactggctccgtttcaagccaaatccaagctaaaaaccatgttcggttcgagttctggggggtcgttgatggcagcgtcactgctgatgatggactcccacaacagatatctcacgagccacttggtccagatcctgaagaacgtggtgcttcacctcgtgcggctcatccagaagacgctggaggcgtcgacacagatcgccccattgcgggaccgcgggccgggccctctggcggccaagacgaggcccggtccgccgcttcaacctcgcgtcgcttcgcggcgacggcgagcggacgcgggcccgcggaccgtccgccgggcgggaccgggccccgtccacctggcctcactatgccaggatcccgggcctctcgtgcgccgcgcggcacggtcgccacggccgaacaacacggcctcgaggacgcggcgcttcggcgaggcgcgcggagcgacggctcctgcgcagcccccacgcctgctacggacccccacgtgcgccgtttggctgcccaagaccccccgccagcccctccagcgcgcgccgccgccgcaggatcccccagtgagttggcaggacccggcagggcggccggcaggctgcccgattgggtagcgcctggggcggcgctcgcagccgccactgcgcgggccctggcggtccgccacgggcccagcgacctggacgatgacagcagcgaggacgacgacggcctcgccggccctgccgccgccggcagcggcccccaagaccccgccgatgatgctggccgacccggcagggcggccggcaggctgcccgtcggtagagcgcccgcagccgccacggcgcacgctcccacgggtagccagggccccgacgacctccgccgcacccaggacgacgacggcgacggcgacgacgaggacggccaagacgaccccgccgccgccgccaagccccgccaggaccctgcgagtgtgttgccccggcccggcagggcgggcggcaggctcgccgacatgccaacgcctggagccgcgccggctgcgactgctgcagctattgctgaggcggcagttgcagctgacgctgcggctcgggctgccgaccaagtcgccgcgcaggagccggtgcagacgacgtacgcacacagcgccaccgagttcaagtgcagcgtgtgtgcgtacgtcgcaggcaacttggctacgctcgtcgcccaccgcagatcggcgcaccgcggcacccgcttctccgacatcttcgacagcgggtgcgcgtgcagcctcgtgttccactcgcggatggcggcgacgagccatgccctcgcctgcgcacagcgcgcctcgcaggcggcgccttcccccgcagaggccatggacgttgaccaaggccgcgtccggcccaggcagcgccgcccatcgcctcgccgacccagcgagcgacgcccggacggcaagcgccgccgcctcaacagcgaagacgacgccgacgcccagaagccggccgagcacctgcagctcgcggacgaggacggagccgagaaccacaccccggtgcacacgccatcagcggcaagcgcccaccaagctcccgtcctcgccgtatacgtgcacaacgcggagcgcttcacgtgcacgctgtgcacgttcacggcagccagcttcagctccttgcagaggcatcggaccacccggcaccggcgcgcagtcctccaggacaagtttctggcgggctgcgcgtgcggcacccccattgcgtcgcggccagcggcagctaaacacgcgcaagcgtgcgccggccgttcgactgcacttccggctacggctccgccagtggcagggacatcaagccccaccgatgccgcagccaccgccaccgtcgcggcggccactgtcacgcccgactcgccccaaccagcaaccccggagctcgcagcgccccccccgcttgcgagccccactcatcccgaagttgttgaagtgcaggagcagccgagccagggacgatgggggccagcgctaccccgagctctggtcgctgaacgtgtcgccgcgcgccttggtgccattccagcaccacgctgggaacctccgctgccccgagagctggtgtccacccgcatagctgcgcgtctcggtgaggttccagcgcctcgctggggcccaccgctgccgcgccgcatggtggcgtctcggatcgccgctcgcctgctcccaccagagccgacggctgacggcgagaccaaggaggacaccccggcggacggagccgacctgacggccagggacgcaaaccaggagaacaacccggcggccgcacccgaccggacggcgacagcggcggcgatggacatggacagcggcgccgacggagagtggctgctgcgcttcgacggcgcctgccgcgccaacccaggacccggcggagctggtgcagcgctgttcaagcccgacggctccgtggtgtggacgtgctcccactacatgccgagcagcagtgaaacgaacaacactgccgagtactcggcgctgctgctcgggccgagagccgctgccgaccacggagcgacgtcgctgtgggtggaaggcgacagcatccttgtgatccagcaggtgcgcggcatcttcgcagcgaggaacgccgttctacgccgcctccgcgaccacgtcaaggtggagctcgcgcgggtggggagcttctcactccaccacatcgaccgccaagcgaatgcccatgccgaccgcctggccaaccgagccctcgacctccgccggacgatgatggagtgcggtgttcacacggcaggcgacggctgtacgaacacgacgctggaccctatgcccgtgctgccgccccagccgacaccccgcactccgcctccgacacccgcggccgacaccaacatcgagatgcaggagccggaggacgaggatctcgccgacatcgacgacggcgaggtctatgcggccatgcgcatcgggccggacgcagttccgcagcgtcgaccccgcctccgactacgccagctcaccgaagctgaggacgacgctgcccgcgagatggtggagcggcttggcgcgacgctggcggccaagatcactgacgccagtgactgggagtcggcggagggctacatcacagccctcccgcacctcctgtacgacaaattgcagccgtactcccaggcccagcgacgccccgagccgcgtccccagcgacagcgacagcagcaccaaggcagccagtgcccgcggcaacagcggcaacaaggcgaacagcgacggcagcgcccgctgcacgaccaagggcaggaccgccgcagcctggaaggcgatgcacatggagacaacgagcgcgatggcgacgccagtcagcaggactcggcgcgacggaggcagtgcaggcgccgcgggcgctctggtgcagcgaagcggcgacgtcgccgccgcccgccgcgggtgactcgacaccaccgcgagcaccgcctcgacgaggccttggacgacctccacgccgtggagcaggcttcgcccagagaccgcactgctgttcgccgagcccgccgccgcgtcggccgcgtcaactcggccatcgaccaacagcacctgcgtcaccggttcgacacggacgagaaagcctgcgtcgaagacatcctggccaaggcacgcgcgcagcgggagacaccaaggacagcggcctccagcgccggcaccgcatcggacccagcggcgccagcggcaggcgctacagacgacggtacctgccccattccgggcgatgagctctggcggtacttcgacggcgtcaacacacccagccaggaattcgctcctgacgccccggcgggtgctgccttccgctccgctatgacccacctgcctgccgcgtcgaggttcagggagctgctcacggaggcgccgacacaggacgatatcgagtcacagctgcagcacgcccacggcacctccagccccggcctcgacggcgtcggctatgacgtgtaccagcacttcgccgcgcagctcctgcccgtgctcgccaccgccttccagaagtgctgggaggcgaaacgtgtgccccagagctggaagctcggggtggtgcggctgctgcacaagaagggcgcgcgcgaggacccggcgaactggaggcccatttgcctccagcaagccatctacaagctctacacgggggtcctcgcgcggcggctggtacggtggatggacgcgaacgaccgccacgccccggggcagaagggcttccgagcggtcaacggctgcggggaacacaacttcctcgcggccacgctcgtcgaccaggcccgccgcaagcgccgccagctctacgaagtctggtacgacttccgcaacgcgttcggcagcgtgccgttcgcgctgctatgggatgcactcgcgcggctcggcgtccccgacgactacgtcaccatgtgcaaggggctctacgagagcgcggcgttcgtcgtcgggaacgccgccgacggcacaacggccccgatctcgctgcgggtgggagtcttccaaggctgcccgctcagcccacagctcttcaacgctgccatcagcccgctgctcttcgcgctgaagcgactgccggccacgggagtgccgctgtcgggcgatgactgccccggtgcctcggcgtacgccgacgacctcaagatcttcagcggcaccgaggacggcatcaagcgacagcacgcgctcgtggccgacttcctccgctggaccggcatggcggccaaccccagcaaatgctccgccatgtcgatccagcgcgaccgccgcggcgtgctcaaggcggacgacctcaagctggagctggacgggtcgccgatccccgcgctgtccatgagcgcctcgtacacctacctgggggtcggcgacggcttcgaccacacacgccgccgcgtcgagctcgcgcccacgctcaagcagctgaaggatgacgcgacagcgctgctccagtcgggcctcgcaccgtggcaggtggtgaaggcggtgaagacgtacctctaccctcgggtggagtacgcgcttcgccacctccgccccttccagcagcagcttgcgggcttcgaccggcacctcgcgcgaggcctccgccatctcctgcgactgccagcctccgccacagcgcagtgcttctacgcaccggtgtcgcgcggcggactgggcctactgccgctgacggaactgcacgcggcgctgcaagtcgcgcatgggtggcagatgctgaactccaaggaccctgccatccagcgcatcgcgcgcgtgcagccccggcagatcgccgacgcgcgccaccggctggacactcaagcgtgggcgggccgcgaggaggagctgtgcgagctgctgctcaactcgcagctcgggacgtcgcccgacgcgccgccaaagcgccgcaacggcgacatcggctcgctctgggtcgacgtccagcgccacctccgcacgctcggcctccagttcgcgaccgcgccggcgtgcgccgacaccggtacggccgcggccacgctgcagcttcgcgtgccgcaccacgacaagtggctcgaccaccgcacggtcctgcggcacgtgaagctgcacatcaagcacagacactggaccaagtgggcggccatgcgcgaccaaggcagaacggcacgcgcgcacggcggcgtcggcagcagcttcctcacgcggccgcgaggcatgtgggaagctgactaccgcttcgcggtggccgcccgcttgaaccagctcgacacgcacagtgtgctcaagcgccggcgcctccgggcccacgaccgatgcaggcagccgggctgctcccgggtggagacgctggcgcatgtgctcaaccactgcccgggcaccatggatgcggtccgcggccgccacgacgacgcactcaagaccatcgagcgtgcgctcatcgcgtcgtcgtcgggcgaccggcaggaccgcgttgagctccgggttaaccagaccgtgccctcgctcgctggccccgcgctacggcccgacctccagctgtacaaccacaccaagaagacggtggcggtggtcgacctggccgtggcgttcgaggagcaggcgggcgaggacccggacagctcagcgctggcccgcatcgccgcacacaagcgcgccaagtacgaccgcatcaagcgccacctcgagcgccaagggtggaaggtgcacctctcggcgctcgtttacggctcgcttggtgcggtcgccggtggcaaccgctcggtttacaccgagcacctggggctgctcaagcgagacgcgaagcggctggactggcagctatctgccgcgtgcatacagtccagccgccgcatctggaacctgcattgcagccagcaccgcgcccgccagcacgcacagcgccccagccaagacaccaggggcagtcgggtgacggagaccggggggactccgtcgcgctccggccgccgctagacggcaaccaggcccattgcggccgacagggccacacccatgtagggaaccgccctcggaaaccctgcaccggctcacatggtccgaccccccgattggttcaacccgtacaccaactacacaccaattagggactcccaggtagtcactaccaggacgcaacggactaaccggcaggtaatacattaaccctttctgttctaatcagtgtgaaaactggtttccctgcttttggtggggtctttttcacatttatttttggaactgctgctttcggttagcttgctagccaatcgcggtacggtctccgggggctttcacctatcccccgcgaggccaactactacttgatcttttctatcctcttccttcttctgcctacgggccggcaactaccttttcggcccttcaccaccgcatcggcgcatgcgcttctggtggccggactggcagccccgggagcgctcgccgtccaccgacagcgagtgctccacggccagccactccagcctcgccagcgacgcgtctttctatagcgcggccagcgacggggctggggcggctgagctggcggacgtccgggcgggggcggatccgctagggcttcggttacgcattggggatccgcccgcccccgttttgggctcggccggagccgaaaatggccccggcgaccctccacgcgcggcgccgctgctcggcaccggcgaggagttggccggcgcaacttcgggcacgggtccgcgacccgctgcgcccattgcgcccattgcgggaccgcgggccgggccctctggcggccaagccgaggcccggtccgccgcttcaacctcgcgtcgcttcgcggcgacggcgagcggacgcgggcccgcggaccgtccgccgggcgggaccgggccccgtccacctggcctcactatgccaggatcccgggcctctcgtgcgccgcgcggcacggtcgccacggccgaagaacacggcctcgaggacgcggcgcttcggcgaggcgcgcggagcgacggctcctgcgcagcccccacgcctgctacggacccccacgcgcgccggttggctgcccaagaccccccgctccgcccctccagcgcgcggcgccgccgcaggaccccccagtgagttggcaggacccggcagggcggccggcaggctgcccgatccggtagcgcccggggcggcgctcgcagccgccactgcgcgggccctggcggtccgccacgggcccagcgacctggacgacgacagcagcgaggacgacgacggccccgccggccctgtcgccgccggcagcggcccccaagaccccagcagtgtgttgccccgacccggcagagcgggcggcatgctcgccgagggtggaacccaggcgcccccaacaccaagcccagctgcggctgcggctgccgccgacgtaggaacagccgcagccgcagctgtccaagatgcagcaactcctgttgtgcgcgccaccgtggggcaccgcgcgcgcgctacgccgaacccagcacgctactatcagccacgcgcgcgcgtggagcccatgacaggcgacgcgctccgccggagcagacgctgcaagaaccatggccacgacggaggtgaccaagaggccaagacggaggagagcgatgccacggcggctaaactcgcggccgtgcaagcagcaccgaggacccagccccagcactttggaccggacgacggccagcagggcacggtgcaggcgcgagtgcgcgttgtgcgcgtacgtcgccccgaacctcgcgacgctggtggcgcaccgccgagcagcacaccacggcacccgcttccaggacgtcttctccagcgggtgccgatgctcgctcatcttcttctcgcggatcgtggctgcatgccacgcccaagcgtgtacccagcgcaaccctccagccgcggccgccacctccgcgacggcccaagcttcggaagcagcggtgccacccccgacacctgttgaccccccgacgcggatcggggctgctgcgacccccaccagcagccccgccgcagcaaggactgccgctgcagcagccgcaccacgcggcactgcagcagccgcaccacgcggcactgcggtggcagacaccgccaccctgcagagcgctgtgcccgccgctcccaagacccctgggcgccagcatgtccccccccgtgctgacccccacccgatctcgcctggtgcagcaggttacaggcaagcggcgccgactcaacccgaccgccagcgccgccaccttctccacacggacgcccgcgacgctgcagggaccgccgaacgggaagacgacgccgccaccagcggagacgacgacggcggtgggcccgcccatgctggaccgccatcccgccgacgggacgccacacccggacgtcgagacggcaccggcaccgcagccgacgtcggcgaccaaggcacaggcaacgccggcaaccacggagacggcgatgatgacgacggcaacctcgaaggcggcgacgacagcgacagagacggcgacgccgctgccgcccgtgctggcccgccaccccgccgaggtggagccagcacctgacatcgagatggcgccgccgccgtcgaccgcggacgcgatggagacgacgacaccgcccccgacggtgacagctgcaacggcgacaacgacgacagcgacgacagcgcctgaggagacggagacgacagcgatcaaggagaaggagacgatgacgacggcagcgtccacggcgcagacgccgccacctccagcgagacgagcaacgcgctggggcccaagacctggcacgaacgacactgcccaggctgtgaacgacgagcacgctgctaacccggcagcgcaccggccactgggctccgctgcaccggtcaccggtgcaacacggtggggtccacgtcacggcgcgatcggggcagcggctgtagctcgcctgctcacaggcctacccacggcaccagcaccagcgacgcgccggcctgcttcggctcggcgctgcccagacccgcccgcttcccccgcggccacgacgacagcccccgatgcgatggacgtcgacggagggccggctatgcccgagccgtgggtgctccgcttcgacggcgcctgccgccggaacccgggacctgggggagctggtgccgccttgttcaagccgtgcgggaccgtggcgtggacgtgctcgcactacatgccaaacagcagcgagaccaacaacaccgctgaatacacggcgctgctgcttggcgtgcagagtgccgtccaccacggcgcctcgcacctggagatcgaaggtgacagccacctcgtcgtagcgcaggtcaagggcaccttcgcctgcaggaacccgtgcctccgccagctgcgcaaccgcgtccgccacgccctccgcgccgtgacgtccttaacgctcaagcacatcgaccggaaggcgaacgcgcacgcggacagactggcaaaccgggcgctggacctgaagcgttcgctggctgagtgcggcgagcaccaaggggcgatggagagctgcctccacatggatcctgctgcacaacgccagcgcgagcaacccgcacctcctgcccgccccgcgtgcgcacccacgcgcgccgagtctgccagcgatcatgacgaggacatcgacgcagagattgccgcgcgcgacggcggcgaggcgttccccacgctgcctatcgggcccgggacggctccagcgcggcagccgcgccttcgactgcggcagctgaccgaagacgagcaggaagcggcggcgtcggccctgcaggccatggcggaggagctagcgtgcaagatcgaagacgcagacagctggacctcgggcgatggatacatcagcgccatccccggtcgcatccggcagttgctgcagcccttcacagcagcccagccccaccctcggcctccactgcaacagcagcgacagtgaccgccccgggtgacgcgcactcagcgcgagcatcgactcgacgaggccctcgacgagatggcggcggtgcagcaggagcgacccaccagcagatcggccgtccgccgtgcgcaacgccgcgtcggccggatccgcgcctcgatgcgccaacagcagctccgccacgacttcgctcgcaacgagagcaagtgcgtcgaggacattctgcgtgctgcgtcggcggagaccgcagcggaggagcacccggagacgtgccccatcgactcgggcacgctccacgagctcttcacggcggtgaactcgccccgcatcaacttcctaccagatgaagcttgcggggcgttgttccgcgaggcgatgaccgacgtcgggacaccgcaggagcggcggagcgcgctcacggacgagctgacgatggacgaggtggaggaccagctcatgcaagcggccacgaactccagccccggccacgacggcgtgggatacgacatctacaagaagttcgcggcgcagctggcccccctcctccacgcagccttccagttctgttggcgccaccaccgggtgcctgccccgtcgaaggtggggttcgtccgcctcatccacaagaagggcgaccccaacgacccagcgaactggcggccgatctgcctgcagaccgcgatctacaagctctacagcggtctgctggagcgtcggctgtcgacgtacctggaggcgaacggactgctgcccatggcgcagaaggggttcagggcgtacaatggttgccacgagcacaacttcgtggcaaccacgctcctggaccaaacccgacgcatgcgccgcaggctgtaccaggtctggtacgacctgcggaacgcgttcgggtccgttcaccaggacatgctgtggtatgtgctccgcctgctcggcgtcgagcgtgcgttcgtcgagcgctgcgacgacatctacgaggactcctatttcgtcgtcggcaacgcggccgacggagcgacggaaccagtgcggcaggaggtgggcgtgtaccaaggctgtccactcagccccctcctgttcatcgccgcgctggtgccgttgctccgagcattggagaagctcgacggagtgggcgtcgcgttggcggacggggtgcggccatgcaccaccgcctacgccgacgacctcaaggtgttcagcgacagcgcggccggcatcacgcgctgccacgctgtcgttgagaagttcctggagtggacggtgctgcaggccaatccaggcaagtgcgccttcctggccgtgacacgcaacgcgcgcggcaaccccgcccacgacaaggacatgaagctgtcgctccacgacgaggaggtctcaagcatcaagctgcacgacagctaccgctacctcggcgtgggcgacggcttcgatcacgtgcgccaccgtctccagctagagcccaagctacagcagatcaagcgggaggcggtggcgctgatgcagtcggggttggcgccgtggcaggtggtgaaggcgctcaagacctacgtctaccccaaggtcgagtacgcgctccgccacctccgaccgctccagtcccaactgcagggcttcgaccgtgtggtagccaagggcctgcggtacctgctacgcctgccccgctcggcaaccaacgaggtgctctacgcaccaacgtcgagcgggggcttggggctccagccgctggtggaaatgcaccgcgcgctgcagatcgcccatgcgtggcagatgctgcactcgaaggacccagcgatccgggaagtggcgcgcgcacaggtgtgccaggtggcccgcaagcgtcaccgcctccgcgaagaacactggcgggggcgtgacgacgagctcgtgcggtgcttcctcaactccgagctcgccgcctcgccccacgcggaggcgctgcgccgccacggcgacatcgggtcactgtggtccgacgtacagcggtggctgcgcatctaccacctcagcctggcggtgcaggacgaccgcaacggccaggacccactcggcctccgcgtgccgcaccacgccaagtggctcgaccacaagtcggtgctgcggcacgtaaagttgcatatgaagatccgccaccagacccgatggaagggtctggcggaccagggcaagacggtgcgggcccacggcggtgtcggtgccaagttcatgtcgacatgggcgggcctgtcggacgacgactaccgcttcggcgtgaaggcccgcctcaaccagatcgacacgaacgccgtgctcaagcgcaagcggctgcggtcgcacaagacctgcagggacccgacctgctcctcggccgagacgctggcccatgtcctcaaccattgcgagtccaacatggacgcaatccgccagcgtcatgacgacgccttggagcagatcgggtccaagatccgcaacgcgctcaagcgcggcaagtcgaccgcggagctgcgcctgaaccagacggtacccgagtacacgggcgcagctctgcggccagacatcgtactgcggatcgtggccgccaagaagatggtgatcgccgacttggcggtcacgttcgaagagcacgcggccggcgcccgccactcctcgctgcagctcagccacgaccacaagacactcaagtaccaaccgatcgtggcggagctgcagctcaaggggtggcaggtgcagaccgcggcgatcgtgtacgggtcgctgggctcggtgcagcccggcaacttcaacacctacacggaaaagttgaagctgcacaagcgcgaggctcgacagctggaccttcagctgtcgagccactgcatccgcgccagccaccgcatctggggctggtactgccggcgccaccgcgaaggacaacggagcggcaacgcctcgcgagcgccgcgtgggtctgggggggccccgcggcgcacatcgcaggctcgggcacggcggtaagctggtcatttgaccaacagggcactacccaggtagggaaccgcccttcaaaaacacaggaagacacaaacaccctccctttagtgacatgcatattttagcctacatttcagttacggagaggttactaactggtaaacacgaacacacattctgttctaatcagtgtgaaaactggtttccctgcttttggtggggtctttttcacatttatttttggaactgctgctttcggttagcttgctagccaatcgcggtacggtctccgggggctttcacccatcccccgcgaggccaactacacttgatcttctccgtttcctctactcttatttttgcatcaactgttaatattgacatatttcagcctattgctatattttataatgttattgctatatttcgtaattctatcgctatatttcgtaattctagtgctatatttcgtaattctatcgctgtatttcgtaatgctagtgctatattttataatgctattgataggtttggcattatccaccgcagctttttgcaatttaaaagtttcacttatccgacgtcacaacggaacagctggcactgtttagggttgtggaccttctcggcctttggctaagatcaagtgtagtatctgttctaatcagtgtgaaaactggtttccctgcttttggtggggtctttttcacattcatttttggaactgctgctttcggttagcttgctagccaatcgcggtacggtctccgggggctttcacccatcccccgcgaggccaactactacttgatcttttctatcctcttccttcttctgcctacgggccggcaactaccttttcggcccttcaccaccgcatcggcgcatgcgcttctggtggccggactggcaaccccgggagcgctcgccgtccaccgacagcgagtgctccacggccagccactccagcctcgccagcgacgcgtctttctatagcgcggccagcgacggggctggggcggctgagctggcggacgtccgggcgggggcggatccgctagggcttcggttacgcattggggatccgcccgcccccgttttgggctcggccggagccgaaaatggccccggcgaccctccacgcgcggcgccgctgctcggcaccggcgaggagttggccggcgcaacttcgggcacgggtccgcgacccgctgcgcccattgcgcccattgcgggaccgcgggccgggccctctggcggccaagccgaggcccggtccgccgcttcaacctcgcgtcgcttcgcggcgacggcgagcagacgcgggcccgcggaccgtccgccgggcgggaccgggccccgttcacttggccgcactatgcccggatcccgggcctctcgtgcgccgcgcggcacggtcgccacagccgaagaacacggcctcgaggacgcggcgcttcggcgcggcgggcggagcgacggctcctgcgcagcccccacgcctgctacggacccccacgcgcgccggttggctgcccaagaccccgccgccgccgctccgcctctcctcgcgcccccgctgccccccagtgatgttggccgacccggcagggcggccggcaggctgcccgtcagtggagcgcccgcagccgccacggcgcgcgctcccacgggcagccagggccccgacgacctccgccgcgcccaggacgacgacggcgacggcgacgacgcggacggccaagacgaccccgctgccgccaccaagccccgcccggaccctgcgagtgtgttgccccggcccggcagggcgggcggcaggctcgccgacatgccaacgcctggagccgcgccggctgcgactgctgcagctattgctgaggcggcagttgcagctgacgctgcggctcgaactgccgaccaagtcgccgcgcaggagccggtgcagacgacgtacgcacacagcgccaccgagttcaagtgcagcgtgtgtgcgtacgtcgcaggcaacttggctacgctcgtcgcccaccgcagatcggcgcaccgcggcacccgcttctccgacatcttcgacagcgggtgcgcgtgcagcctcgtgttccactcgcggatggcggcgacgagccatgccctcgcctgcgcacagcgcgcctcgcaggcggcgccttcccccgcagaggccatggacgttgaccaaggccgcgtccggcccaggcagcgccgcccatcgcctcgccgacccagcgagcgacgcccggacggcaagcgccgccgcctcaacagcgaagacgacgccgacgcccagaagccggccgagcacctgcagctcgcggacgaggacggagtcgaggacccaccccaagcgcacaagccatacgcggccagcgctctctcggcccctgtcctcgccgtgtatgtgcacaacgcggagcgcttcacgtgcacgctgtgcacgttcacggcagccagcttcagctccttgcagaggcatcggaccactcggcaccggcgcgcagtcttccaggacaagtttctggcgggctgcgcgtgcggcaccccctttgcgtcgcggccagcggcagctaaacacgcgcaagcgtgcgccggccgttcgactgcacttccagctacggctctgccagtggcagggacatcaagccccaccgctgccgcagccaacgccaccgtcgcggcggccactgtcacgcccgactcgccccaaccagcaaccccggagctcgcagcgtcccccccgcttgcgagccccactcatcccgaagttgttgaagtgccggagcagccgagccagggacgatgggggccagcgctaccccgagctctggtcgctgaacgtgtcgccgcgcgccttggtgccattccagcaccacgctgggaacctccgctgccccgagagctggtgtccacccgcatagctgcgcgtctcggtgaggttccggcgcctcgctggggcccaccgctgccgcgccgcatggtggcgtctcggatcgccgctcgcctgctcccaccagagccgacggctgacggcgagaccaaggaggacacctcggcggacggagccgacctgacggccagggacgcaaaccaggaggacaacccggcggccgcacccgaccggacggcgacagcggcggcgatggacgtggacagcggcaccgccggagagtggctgctgcgcttcgacggcgcctgccgcgccaacccaggacccggcggagctggtgcagcgctgttcaagcccgacggctccgtggtgtggacgtgctcccactacatgccgagcagcagtgaaacgaacaacactgccgagtactcggcgctgctgctcgaagcgccgcgtcctcgaggccgtgttcttcggccgtgtactccgtgccgcgcggcgcacgagaggcccgggatcctggcatagtgaggccaagtgaacggggcccggtcccgcccggcggacggtccgcgggcccgcgtctgctcgccgtcgccgcgaagcgacgcgaggttgaagcggcggaccgggcctcggcttggccgccagagggcccggcccgcggtcccgcaatgggcgcaatgggcgcagcgggtcgcggacccgtgcccgaagttgcgccggccaactcctcgccggtgccgagcagcggcgccgcgcgtggagggtcgccggggccattttcggctccggccgagcccaaaacgggggcgggcggatccccaatgcgtaaccgaagccctagcggatccgcccccgcccggacgtccgccagctcagccgccccagccccgtcgctggccgcgctatagaaagacgcgtcgctggcgaggctggagtggctggccatggagcactcgctgtcggtggacggcgagcgctcccggggttgccagtccggccaccagaagcgcatgcgccgatgcggtggtgaagggccgaaaaggtagttgccggcccgtaggcagaagaaggaagaggatagaaaagatcaagtagtagttggcctcgcgggggatgggtgaaagttcccggagaccgtaccgcgattggctagcaagctaaccgaaagcagcagttccaaaaatgaatgtgaaaaagaccccaccaaaagcagggaaaccagttttcacactgattagaacagatactacacttgatcttagccaaaggccgagaaggtccacaaccctaaacagtgccagctgttccgttgtgacgtcggataagtgaaacttttaaattgcaaaaagctgcggtggataatgccaaacctatcaatagcattataaaatatagcactagcattacgaaatacagcgatagaattacgaaatatagcactagaattacgaaatatagcgatagaattacgaaatatagcaataacattataaaatatagcaataggctgaaatatgtcaatattaacagttgatgcaaaaataagagtagaggaaacggagaagatcaagtgtagttggcctcgcgggggatgggtgaaagcccccggagaccgtaccgcgattggctagcaagctaaccgaaagcagcacttccaaaaatgaacgtgaaaaagaccccaccaaaagcagggaaaccagttttcacactgattagaacagaaagggttaatgtattacctgccggttagtccgttgcgtcctgatagtgactacctgggagtccctaattggtgtgtagttggtgtacgggttgaaccaatcggggggtcggaccatgtgagccggtgcagggtttccgagggcggttccctacatgggtgtggccctgtcggccgcaatgggcctggttgccgtctagcggcggccggagcgcgacggagtccccccggtctccgtcacccgactgcccctggtgtcttggctggggcgctgtgcgtgctggcgggcgcggtgctggctgcaatgcaggttccagatgcggcggctggactgtatgcacgcggcagatagctgccagtccagccgcttcgcgtctcgcttgagcagccccaggtgctcggtgtaaaccgagcggttgccaccggcgaccgcaccaagcgagccgtaaacgagcgccgagaggtgcaccttccacccttggcgctcgaggtggcgcttgatgcggtcgtacttggcgcgcttgtgtgcggcgatgcgggccagcgctgagctgtccgggtcctcgcccgcctgctcctcgaacgccacggccagatcgaccaccgccaccgtcttcttggtgtggttgtacagctggaggtcgggccgtagcgcggggccagcgagcgagggcacggtctggttaacccggagctcaacgcggtcctgccggtcgcccgacgacgacgcgatgagcgcacgctcgatggtcttgagtgcgtcgtcgtggcggccgcggaccgcatccatggtgcccgggcagtggttgagcacatgcgccagcgtctccacccgggagcagcccggctgcctgcatcggtggtgggcccggaggcgccggcgcttgagtacactgtgcgtgtcgagctggttcaagcgggcggccaccgcgaagcgatagtcagcttcccacatgcctcgcggccgcgtgaggaagctgctgccgacgccgccgtgcgcgcgtgccgttctgccttggtcgcgcatggccgcccacttggtccagtgcctgtgcttgatgtgcagcttcacgtgccgcaggaccgtgcggtggtcgagccacttgtcgtggtgcggcacgcgaagctgcagcgtggccgcggccgtgccggtgtcggtgcacgccggtgcggtcgcgaactggaggccgatcgtgcggaggtggcgctggacgtcgacccagagcgagccgatgtcgccgttgcggcgcttcggcggcgcgtcgggcgacgtcccgagctgcgagttgagcagcagctcgcacagctcctcctcgcggcccgcccacgcttgagtgtccagccggtggcgcgcgtcggcgatctgccggggctgcacgcgcgcgatgcgctggatggcagggtccttggagttcagcatctgccacccatgcgcgacttgcagcgccgcgtgcagttccgtcagcggcagtaggcccagtccgccgcgcgacaccggtgcgtagaagcactgcgctgtggcggaggctggcagtcgcaggagatggcggaggcctcgcgcgaggtgccggtcgaagcccgcaagctgctgctggaaggggcggaggtggcgaagcgcgtactccacccgagggtagaggtacgtcttcaccgccttcaccacctgccacggtgcgaggcccgactggagcagcgctgtcgcgtcatccttcagctgtttgagcataggcgcgagctcgacgcggcggcgcgtgtggtcgaagccgtcgccgacccccaggtaggtgtacgaggcgctcatggacagcgcggggatcggcgacccgtccagctccagcttgaggtcgtccgccttgagcacgccgcggcggtcgcgctggatcgacatggtggagcatttgctggggttggccgccatgccggtccagcggaggaagtcggccacgagcgcgtgctgtcgcttgatgccgtcctcggtgccgctgaagatcttgaggtcgtcggcgtatgccgaggcaccggggcagtcatcgcccgacagcggcactcccgtggccggcagtcgcttcagcgcgaagagcagtgggctgatggcagcgttgaagagctgtgggctgagcgggcagccttggaagactcccacccgcagcgagatcggggccgttgtgccgtcggcggcgttcccgacgacgaacgccgcgctctcgtagagccccttgcacatggtgacgtagtcgtcggggacgccgagccgcgcgagtgcatcccatagcagcgcgaacggcacgctgccgaacgcgttgcggaagtcgtaccagacttcgtagagctggcggcgcttgcggcgggcctggtcgacgagcgtggccgcgaggaagttgtgctccccgcagccgttgaccgctcggaagcccttctgtcccggggcgtggcggtcgttcgcgtccagccaccgtaccagccgccgcgcgaggacccccgtgtagagcttgtagatggcttgctggaggcaaatgggcctccagttcgccgggtcctcgcgcgcgcccttcttgtgcagcagccgcaccaccccgagcttccagctctggggcacacgtttcgcctcccagcacttctggaaggcggtggccgggtcgagagccgctgccgaccacggagcgacgtcgctgcgggtggaaggcgacagcacccttgtgatccagcaggtgcgcggcatcttcgcggcgaggaacgccgttctacgccgcctccgcgaccaagtcaaggtggagctcgcgcgggtggggagcttctcactccaccacatcgaccgccaagcgaatgcccatgccgaccgcctggccaaccgagccctcgacctccgccggacggtgatggagtgcggtgctcacacggcaggcgacggctgtacgaacacgacgctggaccctatgcccgtgctgccgccccagccgacaccccgcactccgcctccgacacccgcggccgacaccaacaccgagatgcaggagccggaggacgaggatctcgccgacatcgacgacggcgaggtctatgcagccatgcgcatcgggccggacgcagttccgcagcgtcgaccccgcctccgactacgccagctcaccgaagctgaggacgacgctgcccgcgagatggtggagcggcttggcgcgacgctggcggccaagatcactgacgccagtgactgggagtcggcggagggctacatcacagccctcccgcacctcctgtacgacaaattgcagccgtactcccaggcccagcgacgccccgagccgcgtccccagcgacagcgacagcagcaccaaggcagccagtgcccgcggcagcagcggcaacaaggcgaacagcgacggcagcgcccgctgcacgaccaagggcaggaccgccgcagcctggaaggcgatgcacatggagacaacgagcgcgatggcgacgccagtcagcaggacccagcgcgacggaggcagcgcaggcgccgcgggcgctctggtgcagcgaagcggcgacgtcgccaccgcccgccgcgggtgactcgacaccaccgcgagcaccgcctcgacgaggccttggacgacctccacgccgtggagcaggcttcgcccagagaccgcactgctgttcgccgagcccgccgccgcgtcggccgcgtcaactcggccatcgaccaacggcacctgcgtcaccggttcgacacggacgagaaagcctgcgtcgaagacatcctgtccaaggcacgcgcgcagcaggagacaccaaggacagcggcctccagcgccggcaccgcatcggacccagcggcgccagcggcaggcgctacagacgacggtacctgccccattccgggcgatgagctctggcggtacttcgacggcgtcaacacacccagccaggagttcgctcctgacgccccggcgggtgctgccttccgctccgctatgacccacctgcctgccgcgtcgaggttcagggagctgctcacggaggcgccgacacaggacgatatcgagtcacagctgcagcacgcccacggcacctccagccccggcctcgacggcgtcggctatgacgtgtaccagcacttcgccgcgcagctcctgcccgtgctcgccaccgccttccagaagtgctgggaggcgaaacgtgtgccccagagctggaagctcggggtggtgcggctgctgcacaagaagggcgcgcgcgaggacccggcgaactggaggcccatttgcctccagcaagccatctacaagctctacacgggggtcctcgcgcggcggctggtacggtggctggacgcgaacgaccgccacgccccgggacagaagggcttccgagcggtcaacggctgcggggagcacaacttcctcgcggccacgctcgtcgaccaggcccgccgcaagcgccgccagctctacgaagtctggtacgacttccgcaacgcgttcggcagcgtgccgttcgcgctgctatgggatgcactcgcgcggctcggcgtccccgacgactacgtcaccatgtgcaaggggctctacgagagcgcggcgttcgtcgtcgggaacgccgccgacggcacaacggccccgatctcgctgcgggtgggagtcttccaaggctgcccgctcagcccacagctcttcaacgctgccatcagcccgctgctcttcgcgctgaagcgattgccggccacgggcgcgccgctgtcgggcgatgactgccccggtgcctcggcatacgccgacgacctcaagatcttcagcggcaccgaggacggcatcaagcgacagcacgcgctcgtggccgacttcctccgctggaccggcatggcggccaaccccagcaaatgctccaccatgtcgatccagcgcgaccgccgcggcgtgctcaaggcggacgacctcaagctggagctggacgggtcgccgatccccgcgctgtccatgagcgcctcgtacacctacctgggggtcggcgacggcttcgaccacacgcgccgccgcgtcgagctcgcgcctatgctcaaacagctgaaggatgacgcgacagcgctgctccagtcgggcctcgcaccgtggcaggtggtgaaggcggtgaagacgtacctctaccctcgggtggagtacgcgcttcgccacctccgccccttccagcagcagcttgcgggcttcgaccggcacctcgcgcgaggcctccgccatctcctgcgactgccagcctccgccacagcgcagtgcttctacgcaccggtgtcgcgcggcggactgggcttactgccgctgacggaactgcacgcggcgctgcaagtcgcgcatgggtggcagatgctgaactccaaggaccctgccatccagcgcatcgcgcgcgtgcagccccggcagatcgccgacgcgcgccaccggctggacactcaagcgtgggcgggccgcgaggaggagctgtgcgagctgctgctcaactcgcagctcgggacgtcgcccgacgcgccgccgaagcgccgcaacggcgacatcggctcgctctgggtcgacgtccagcgccacctccgcacgatcggcctccagttcgcgaccgcaccggcgtgcaccgacaccggcacggccgcggccacgctgcagcttcgcgtgccgcaccacgacaagtggctcgaccaccgcacggtcctgcggcacgtgaagctgcacatcaagcacaggcactggaccaagtgggcggccatgcgcgaccaaggcagaacggcacgcgcgcacggcggcgtcggcagcagcttcctcacgcggccgcgaggcatgtgggaagctgactatcgcttcgcggtggccgcccgcttgaaccagctcgacacgcacagtgtactcaagcgccggcgcctccgggcccaccaccgatgcaggcagccggcagaaagacacaaacaccctccctttagtgacatgcatattttagcctacatttcagttacggagaggttactaactggtaaacacgaacacacattctgttctaatcggtgtgaaaactggtttccctgcttttggtggggtctttttcacattcatttttggaactactgctttaggttagcttgctagccaatcgcggtacggtctccgggggctttcaccactcccccgcgaggccaaccactacacttatcttctccgtttcctctactcgtatttttgcatcaactattaatattgacatacttcagcctattgctatattttataatgttattgctatatttcgtaattctatcgctatatttcgtaatgctagtgctatattttataatgctattgataggtttggcattatccaccgcagctttttgcaatttaaaagtttcacttatccgacgtcacaacggaacagctggcactgtttagggttgtggaccttctcggccttttggctaagatcaagtgtagtatctgttctaatcagcgtgaaaactggtttccctgcttttggtggggtcttgttcacattcatttttgcaattcccataagtacttagcttgctaagtgtttacgggacgggcacgctccacgagcacttcacggcggtgaactcgccccgcatcaacttcctaccagatgaagctagcggggcgttgttccgcggggcgatgaccgacgtcgggacaccgcaggagcggcggagcgcgctcacggacgagctgacgatggacgaggtggaggaccagctcatgcaagcggccacgaactccagccccggccacgacggcgtgggatacgacatctacaagaagttcgcggcgcagctggcccccctcctccacgcagccttccagttctgttggcgccaccaccgggtgcctgccccgtcgaaggtggggttcgtccgcctcatccacaagaagggtgaccccaacgacccagcgaactggcggccgatctgcctgcagaccgcgatctacaagctctacagcggtctgctggcgcgtcggctgtcggcgtacctggaggcgaacgggctgctgctcatggcgcagaaggggttcagggcgtacaatggttgccacgagcacaacttcgtggcaaccacgctcctggaccaaacccgacgcatgcaccgcaggctgtaccaggtctggtacgacctgcggaacgcgttcgggtccgttcaccaggacatgctgtgatatgtgctccgcctgctcggcgtcgagcgcgcgttcgtcgagcgctgcgacgacatctatgaggattcctacttcgtcgtcggcaacgcggccgacggaaccagtgcggcaggaggtgggcgtgtaccaaggctgtccactcagccccctcctgttcatcgccgcgctggtgccgttgctccgagcattggagaagctcgacggagtgggcgtcgcgttggcggacggggtgcggccatgcaccacggcctacgccgacgacctcaaggtgttcagcgacagcgcggccggcatcaagcgctgccacgctgtcgttgagaagttcctggagtggacggtgctgcaggccaatccaggcaagtgcgccttcctggccgtgacacgcaacgcgcgcggcatcctcgcccacgacaaggacatgaagctgtcgctccacgacgaggaggtctcaagcatcaagctgcacgacagctacccctacctcggcgtgggcgacggcttcgatcacgtgcgccaccgtctccagctcgagcccaagctacaacagatcaagcgggaggtggtggcgctgatgcagtcggggttggcgccgtggcaggtggtgaaggcgctcaagacctacgtctaccccaaggtcgagtacgcgcttcgccacctccgcccgctccagtcccagctacagggctttgaccgtacggtagccaagggcctgcggcatctgttacgcctgccccgctcggcaaccaacgaggtgctctacgcaccaacgtcgagcggtggcttggggctcgctgcactcgaaggacccggcgatccgggaggtggcgcgcgcacaggtgtgccaggtggtccgcaagcgccaccacctccgcgaagaacactggcgggggcgtgacgacgagctcgtgcggtgcttcctcaactccgagctcgccgcctcgccccacgcggaggcgctgcgccgccacggcgacatcgggtcactgtggtccgacgtacagcggtggctgtgcgtctaccacctcagcctggcggtgcaggacgaccgcaacggccaggacccactcggcctccgcgtgccgcaccacgccaagtggctcgaccacaagtcggtgctgcggcacgtaaagttgcacctgaagatccgccaccagacccgatggaagggtctggcggaccaaggcaagacggtgagggcccacggcggtgccggcgccaagttcgtgtcgacggtggcgggcctgtcggacgacgactaccgcttcggcgtgaaggcccgcctcaaccaagtcgacaccaactcggcgctgaagcgtaagcacctgcgggcccacacggcctgcagggacccgacctgctcctcagccgagacgctggcccatgtcctcaaccattgcgagtccaacatggacgcactccgccagcgtcatgacgacgccctggagcagatcgggtccaagatccgtaacgcgctcgagcgcggcaagccggtcgcggagctgcgcctgaaccagacagtgcccgagtacatgggcgcagccctgcggccggacatcgtactgcggaacgtggccgccaagaagatggtgatcgccgacttggcggtcacgttcgaagagcacgcgaccggcgcccgccactcctcactgcagctcagccacaatcacaagattcttaagtaccaaccgatcgtggtggagctgcggctcaaggggtggcaggtgcagaccgcggcgatcgtgtacgagtcgctggactcggtgcagcccagcaactgcaacacctacacggagaagttgaagttgcacaagcgcgaggctcgacagctggaccttcagctgtcgagccactgcatccgcaccagccaccgcatctggggctggcactgccggcgccaccgcgaaggacaacggagtggcaacgcctcgcgagcgccgcgtggggggcgcggcgcacatcgcaggctcgggcacggcggtaagctggtcatttgaccaacagggcactacccaggtagggaaccgcccttcaaaaacccaggaagacacaaacaccctccctttagtgacatgcatattttagcctacatttcagttacggagaggttactaactggtaaacacgaacacacattctgttctaatcagtgtgaaaactggtttccctgcttttggtggggtctttttaacattcatttttggaggcactgacccaaaggcgccccgcatttcaaaattttcaaatttcagaaagatcataactaaattatactttcgaacttctggcaacaaagagtcagtgccacataaccagaatcaccccgcatccagcacggcaccatggccccccgcacttctcgcaccacgtacaccgcccgcccgggtcgcagccccctcgccacacccagcccccacgagtatgatgtttcctccaacgcgctcttcaccttcaactctgtgatgagcgcgtgcgcgacggagaagggcgcgctggagtgggcgcagcgagtggggcttctggcaagcgcgcctctgtgttctacctgcaccaatggcatgacgttgtacgtcgctgtgaagcggacgcgctggcgctgctcccgcacggggtgccgtctggagagaagcgtacgggcctcctccttctttgcccggtcatcagctccctctcgaagctgatcaagctgctgttgttctgggcgttccagcacccagtcacaacggcagcacagcaggcggaggtgtcgccgacaatggcagggcagtggtatgtctgtgcccaggacatctgcaccgccgagatgaagcggacgttgccgaaggtaaaatcgtacattattctgttgctaaatattatttagttagcagtgttgggttgtatttttaacgggttgaacaatgatgttaaactgctagatcggaggggatgggcacgtggtcgagatcgacgaaacgtccctgaagaagaagcaaaagtaccgacgtggtacccgccacccagacttctgggtcttcggcggagtcgaccgaaccactaaaaagtggttcgctcgtgtcgtttataacgaccggacgaagccgactctgctttgattaaagctcacatcaaacctgggtaatgactgtacaactgcgtatgatttgacaagatatctaactctttatgcatgtttatcagtactttgattgtctccgatatgtttaaggcgtacgtgacccaagtccagagtgggcgcaacaaaggaaagttatacacccttatcaacaacaggcacctgcgtgggatgcggtaccaacacctgtgggtaaaccacacgaaacacttcaaggaccccacgactggcgcccatacgaaccgcatcgagggcgtctgggaggtgaagatcaagcagcgcatcaaagctgctcgtggtatgcggaaaagagtggtagctagctacctagacgagtgtatgtggcgcacgtggtacttcgcggagaaacctgcaaagagtcacattttccaagggctagttactggtattaggaagtactacgaggtctagttaaaccaatacaaactgggatgaaaagttctgaaatttgaaaattttgaaatacggggtgcctttgggtcagtgcctttttggaacatccgagaatgctagcttgctagtttttcttggaacggtctccgggggctttcaccacctcccccgcgaggccaaccactacacttatcttctccgtttcctctactcgtatttttgcatcaactattaatattgacatatttcagcctattgctatattttataatgttattgctatatttcgtaattctatcgctatatttcgtaatgctagtgctatattttataatgctattgataggtttggcattatccaccgcagctttttgcaatttaaaagtttcacttatccgacgtcacaacggaacagctggcactgtttagggttgtggaccttctcggccttttggctaagatcaagtgtagtatctgttctaatcagcgtgaaaactggtttccctgcttttggtggggtcttgttcacattcatttttgcaattcccataagtacttagcttgctaagtgtttacgggacgggcacgctccacgagcacttcacggcggtgaactcgccccgcatcaacttcctaccagatgaagctagcggggcgttgttccgcggggcgatgaccgacgtcgggacaccgcaggagcggcggagcgcgctcacggacgagctgacgatggacgaggtggaggaccagctcatgcaagcggccacgaactccagccccggccacgacggcgtgggatacgacatctacaagaagttcgcggcgcagctggcccccctcctccacgcagccttccagttctgttggcgccaccaccgggtgcctgccccgtcgaaggtggggttcgtccgcctcatccacaagaagggtgaccccaacgacccagcgaactggcggccgatctgcctgcagaccgcgatctacaagctctacagcggtctgctggcgcgtcggctgtcggcgtacctggaggcgaacggactgctgcccatggcgcagaaggggttcagggcgtacaatggttgccacgagcacaacttcgtggcaaccacgctcctggaccaaacccgacgcatgcgccgcaggctgtaccaggtctggtacgacctgcggaacgcgttcgggtccgttcaccaggacatgctgtggtatgtgctccgcctgctcggcgtcgagcgtgcgttcgtcgagcgctgcgacgacatctacgaggactcctatttcgtcgtcggcaacgcggccgacggagcgacggaaccagtgcggcaggaggtgggcgtgtaccaaggctgtccactcagccccctcctgttcatcgccgcgctggtgccgttgctccgagcattggagaagctcgacggagtgggcgtcgcgttggcggacggggtgcggccatgcaccacggcctacgccgacgacctcaaggtgttcagcgacagcgcggccggcatcaagcgctgccacgctgtcgttgagaagttcctggagtggacggtgctgcaggccaatccaggcaagtgcgccttcctggccgtgacacgcaacgcgcgcggcatcctcgcccacgacaaggacatgaagctgtcgctccacgacgaggaggtctcaagcatcaagctgcacgacagctacccctacctcggcgtgggcgacggcttcgatcacgtgcgccaccgtctccagctcgagcccaagctacaacagatcaagcgggaggcggtggcgctgatgcagtcggggttggcgccgtggcaggtggtgaaggcgctcaagacctacgtctaccccaaggtcgagtacgcgcttcgccacctccgcccgctccagtcccagctacagggctttgaccgtacggtagccaagggcctgcggcatctgttacgcctgccccgctcggcaaccaacgaggtgctctacgcaccaacgtcgagcggtggcttggggctcgctgcactcgaaggacccggcgatccgggaggtggcgcgcgcacaggtgtgccaggtggtccgcaagcgccaccacctccgcgaagaacactggcgggggcgtgacgacgagctcgtgcggtgcttcctcaactccgagctcgccgcctcgccccacgcggaggcgctgcgccgccacggcgacatcgggtcactgtggtccgacgtacagcggtggctgtgcgtctaccacctcagcctggcggtgcaggacgaccgcaacggccaggacccactcggcctccgcgtgccgcaccacgccaagtggctcgaccacaagtcggtgctgcggcacgtaaagttgcacctgaagatccgccaccagacccgatggaagggtctggcggaccaaggcaagacggtgagggcccacggcggtgccggcgccaagttcgtgtcgacggtggcgggcctgtcggacgacgactaccgcttcggcgtgaaggcccgcctcaaccaagtcgacaccaactcggcgctgaagcgtaagcacctgcgggcccacacggcctgcagggacccgacctgctcctcagccgagacgctggcccatgtcctcaaccattgcgagtccaacatggacgcactccgccagcgtcatgacgacgccctggagcagatcgggtccaagatccgtaacgcgctcgagcgcggcaagccggtcgcggagctgcgcctgaaccagacagtgcccgagtacatgggcgcagccctgcggccggacatcgtactgcggaacgtggccgccaagaagatggtgatcgccgacttggcggtcacgttcgaagagcacgcgaccggcgcccgccactcctcactgcagctcagccacaatcacaagattcttaagtaccaaccgatcgtggtggagctgcggctcaaggggtggcaggtgcagaccgcggcgatcgtgtacgagtcgctggactcggtgcagcccagcaactgcaacacctacacggagaagttgaagttgcacaagcgcgaggctcgacagctggaccttcagctgtcgagccactgcatccgcaccagccaccgcatctggggctggcactgccggcgccaccgcgaaggacaacggagtggcaacgcctcgcgagcgccgcgtggggggcgcggcgcacatcgcaggctcgggcacggcggtaagctggtcatttgaccaacagggcactacccaggtagggaaccgcccttcaaaaacccaggaagacacaaacaccctccctttagtgacatgcatattttagcctacatttcagttacggagaggttactaactggtaaacacgaacacacattctgttctaatcagtgtgaaaactggtttccctgcttttggtggggtctttttaacattcatttttggaactactgctttaggttagcttgctagccaatcgcggtacggtctccgagggctttccccatccgtcgtgaggccaactacatcttgatcttctctatctccttacctaccctgcctacgtaccggcccttcaccaacgcgtcctgggatgcgcttctggtggccggactggcagcgccgggagcgctcgccgtccaccgacagcgagtgctccacggccagccactccagccttgccactccagcctttctgtagcgcggccagggacggggctggagcggctgagctggcggacgtccgggcgggggcggatccgctagggcttgggttacgcatttgggatccgcccgccgccgttttgggcacggccggagccgaaaatgggcccggcgacgcttcacgcgcggtgccgctgctcggcaccggcgcggccttcgacggcgcaacttcaggcacgggtcggggacacgctgcgccctttgcgggaccgcgggccgggccctctggcggccatgccggggcccggtccgtaacttcaacctcgcgtcgcttcgcggcgacggcgagcggacgcgggcccgcggaccgtccgccgggcgggacagggtcgtccacactggcccccactatggccgaatccccgacctctcgcgccctgcgctgcacgcttttctcggccgaggaaggccgagcccaggatgcggccgccgaggaggcgccacggaacgacacctcctgcgcgcgccccaggcctcgccaggacctcccagcgcgccggctggctggccaagacccccggctcgcccctccagtgcgcggaaccgcccaagacccccccctgttgagttggcaggacccggcagggcggccagcaggcggcccgatccggtagcgcccggggcggcgttgacagcggcgactgcgcgggccctggtggtctgccagcgtcccagcgaggacgacgacgaccccagcagcgacgaggacggctcggacgacgacaacgctgcctccaggaccccacaagaccctgcggatgatgctggccgacccgacagggcggccgccaggctcctcgttggtcgagcccccgcagccgctacggcgcacgatcccacgggcagacaggaccacaacagcctccgccgcggccagcacggcgctgacgacgatgctggcggcgctaacgactccaagaccccccccccccccaccgatgatggcccgcccggcagggtggccggcaggctgcccgccggttcagtgcccgtggctgcttcgcatcgcgcgcgggcggccaccacggacccccacgacctccgccgcgccctggacggcgagaacgacgacgctggcggcgcaaccgccctcgcagaccccgtgaatgacgatcgcccacccggtagggcggccggccgccgctgcgcgcactgcagcggccggctacggccccagggaataccaccgcgacccaggcgacgacgcggacggctgcgacgaccgtgccggcgccgccaagacccgcccgaccaccgagagcgtattgctccgacccggcagggcgggaggcatgctcgccgagggtgtagccccagcatctccatcaccaagcgcagctgcggttgccgctgccgccgaggtagcagcagccgcagttactcaagatgcagcagcccctgttgtgcgcgccgccgtggagcaccgcacgcgctgcgccgaaccgagaacgctactaccagccacgcgcgcgcggagctcatgacaggcgacgcgctcagcaggagcagacgctgcaagcaacatggccacgaccgaggtgaccaagaggccaaaacaaaggagatcgacgccgctgcggcgaagctcgcggccgcgacagacgcacgaggacccagacccagcacattgggccggacgacggccaacagggcccggtgcaggcgacgtacgcgcacgacgctgcgcagttcgagtgcgcgctgtgcgcgtacgtcgccacggacctcgcgacgctcgtggcgcatcgccgagcagcccaccacggcatccgcttccaggacgtcttctccagcgggtgccggtgctcgcttatcttcttctcgcggatcgtggctgcctgccacgcccaagcgtgcacccagcgcaaccctccagccgcagccgccacccccacgacggctagtgcttcggagacagcagtgccactcccgacacctgttgaccccccgacgcggcccgaggctactgcgatccccactagcagcctcgccgcagcaaggactgtcgctgctgcagccgcaccacgcggcactgcggtggcagacaccgccaccctgcagagcgctgtgcccgccgctcccaagacccctgggtgtcagcatgtcccccccgtgctgacccccacccgatctcgcctggtgcagcaggttacaggcaagcggcgccgactcaacccgaccgccagcgccgccaccttctccacacggacgactgcgacgtcgacggtaccgccggacgtatacatgtcgccaccaccagcggtgacgatgccagaggtggctctccacgcaggactgcctccccgccgcggtggcgccacacccggacgtcgagacggcaccggcaccgaagccgacgtcggcgaccaaggcacaggagacgccggcaaccacgacgacggcgctgacgacgacggaaactgtgacagagccgacgccgacgcctcccgtgctggcccaccatcccgccgaggtggagccagcaccggacatcgagatggcgccgccgccgccgaccatagaggccccggagacggtgacgacagcgacgacggagaaggagatggcgaagacgaggagacgacggcaacgccagtgcctacggcgacggcactgcagccgcctccacctagacgagcaccgcgctggggaccacgaaccggcgcgaacgacactgctccggctgtgagcgacgatctggctgctaacccggcagcgcaccgacctctgggctccgctgcatcggtcaccggtgcaacacggtggggtccacgtcacggcgcgatcggggcagcggctgtagctcgcctgctcatgcactagaagcttttcgtgagactctaccgaccaatagtattgataaatgtacgcgtgttggttgcactatcgatcacttggctgacagagactacaatctcgctcggacagagcacaaaatgcaatctcgaattgtcctctgtcgttccgagaggtgcgggagacaggaagccgctggatctccggcctgttcctgtcgctacaagttcaaatcctgcctgacggctattggtacctgtgaagtgttccagcagggagagcacgttatggacagagaagatcctcctactccaaagaagcgtcagctttctggtgaaatgaaggacttcattgtggcgagcctggatagtggagagaaaactacagctacgaagttgtacgcgtgcatcgttgcaaagttgtacgcgtgcatcgttgcaatggtgagccaccacgaaatggccgggccagctcctacagacaaacaagtgaccgatttcgtgaaaaactataggcgggaccgacctaaatattccatgcagccaatgattgagctctgcaatgcgcatttgtacgacaatgtgaacctggagactctaccggacgacgacaaggttattttgtgtgatagccagcgcgatgcacgtccaggagctgctggaagcgtgagtcagcttggagacggttccaaggaatatccgctccgcgtcgggatgacctgtcttcgccttgtgcgagactatgtatccgtacgaaataggtccgactgcacgaccatgttccatctggacagtacccacagcatggtgatcaacgggtatttggtgtttgcgtttggatattcggatcgcggcgggtatttctacctacttgcctacttctgcacgtcgcaaaagtgcgctgttgatatcgggtggtgcattcgctgcattaagcgagtttgcatggacgtttgcggcgtggaattcaccccgcaattcgttatgatggacgccgataaggctcaatttaacgcctgcactacagaattgcaactatcaaccgtgttgatgtgctggttccatgttttgcagaacgtttgggaatctgccaacgaaaagggagttggtattgatgatattcgcaccatttttgccgagatgcatgacatgcattatgctacagagctagattttcctgctgtgaagtcacgcgtacttacgaggtggcgtggtttttctcgaggatctgccgagcgtaagctcacagatcatattacgaaaatgtgggtgaactccaaacgtttttcacgttggcagtccttttacaccccgagtggatataccgctactatcaacccgttggagcaataccacaaaaaggtgaaaatgcagtgtccggatggattggctatccagtgaattgattcacaacttggaccgtgcccagctggcgcttttgtaccaagatacgcatgtcagcacagtggcggaagctactgatcgattgatgcatctgtatcgatttatgtacacgcgagggtgtctttcggtgcaccgcatacctcacgtgggggatttgcaagccgcccgctccgccttagcccagcagaaaagaaggatgtgatgaactctatcaaatctgttaatgcgcggcggatgcagactgagggaatgcctccaggcggctgggtggttgacacacgcagtaaagcatgtacatgtgcctacagtaggaaacacgccctctgtgtgcatgttgtggcagcctacattcatggtggggtgcactgtcccggggtcagtgcagggactcggcaatttgtacggccttcgcacagaaatgcggaggaccccttttcttcatcctccgatgaatctttggttgattccacgtatccgagccgatccccatcaactgctgatggtaatcaagactggtttctgggttccgacgatcaggatgcaaactcaggtggcactgccatagaggtagcagatgttgccctacctgtaccagagacgcagtatgaacccgctagtccagcagcttctaccacgtccactctcattctagaatacgacgaggacgaagccaccgccacatccgtgcaagacgattctgtccgtgcgacggactccggcaacaccaatgcggaaaccgctgctccgtcgccaatccctcgcggacgtgtagctgatcctatcgcgcgccgccggtcgaagcgcgcttagaagcccacaaagcgcgctgtcgagtcaagattgcagagtagaaagagaccgagagcgtaagtgatccatttctccgctgtatttttctaacctttaaatgcattcgaactacattatcttaaccctgcatgtatacgaccaattactttttagtcctaaatgttagcctgccatccctgaaaaatgtccaagttgctcaagttcacgcgcgcatgggaaccagatcggtcgtttggtggtggtacaccgcccgtgtctcgaagacccaggaccagaagctggccgacgccttcgcccgcttcgggtgctgctacctcacgggccacggcatcttggacgcgctctcgaagcgcatgttgcagagcgacgagtcgttctgcgcgctgcccgacgagaccaaggctgcgatcccagtggtgcaggacaggggcttcacgcgcgggtacattggcgtgggcaaggagagcggcagcgccgagcgcatagaggtcaaggaggccttttcctacggatacgagtggcccgagggcaagccggagcccttcgcgactggcctgcagggccccaacgtctggcccaaggccgaggcctgcccgtgagcaaccggcaggtgctcaacgagttcttccagaagatggcgatggcctcgcgcgcggtgacccgcagtttgtccaagagtttgtacggagattccaagtagcggagaccaagtgcgcgcggccacggtgccaatcccgaccaaggtcgaaagctccgcgtccgaggatgatacgaaccagggcagcagcaccgacaacggcgagacctcgtccgagccggcgctcgcgtcgtccgcggccatccacttggccacgctcgagttcctgcagggcgcgtacggccagggctccacggtctaccgcaagacgtggcactcgtacttctttgtgctgctggtgtgcaagggctcgctcggcatgttcgcgtcgcaggccgagcacctggcgggcagcgagccccccgccgccgtgttcaagctcagcgggtacacgctgcgcatccgctcgcagcccaagcggccgcaccagttccgcctcacgcacagcagcaagggcggcggcagccccaagaagccgctgcactttgcggcctcgagcctggacgagatgaacggctggatcgcggcactcatcaaggccatcgccgtgatcgacgagcgcgagcgcgtcgcggccgaagagcgactcaacaagcagacggagagtgagagcgccacgcaggagtaaggcaagagaggaagaggttggaatccgcgaggtgttggctgatgggggacaatatgacgtcttcttgttcatattcgtcaatggcaatcatagtactatatacttcgtagttctacaacaaaagcggaggcttcggcgagcctgggaggttgctagataggttcgtagatacacgcgacggtcacacgtaggcacacacgcacgcacacggagttgagtgacttggtgcttgggatgcggcggttggagggaagttgttcttcaagggaggttggttgttgttgtttgggggggggggggggtcttcgactacttgcactccttcgggttcatcttcatcttcatccctcgtacaggttggaggaggggccgcactcgcctttatattggtagaggtagtgtaaagtttagaatgatactgtttaaagatgcagttactagaacagtatgaagctacacttacattaggcggcacgagactcccatttgggtggcgctccctgttttggtgagtggacactctctatcggtatattgtgtgcttaactacggttttgttggtggcgtttattctaagtttggtggagttgtctggttctttggtggtggtacaccgccctccaaaaactcttgacttttcgattaaggcctgaattacgaattacaccctttaatattgaacataacctgatgcgcataccaatccatacggttgctatatttgggcgcatctgtgaatagatctgagcaccagggcgaatgtgaatctcgactgctcgcccaacaacaattccagatagtcagggtatcatcagaggcagcagcgctccagaacattgatggcttgagatcattgacgacctaccacagcacttcgcggacatgcacagtctgtgcgatcatcatcgaccagcccgggatgcgctccagggtgtattactacaacatgcaacgccgaggctcaccagcgtgtacttactggctgaaggtgctacatgtacggtgcgaaccgacaggagtaaagtattggagaacaccggttaagtgtcgtctcccaacgtcgttatgtcattactcgtcagatgaaggacgagatcatccgactatatgtaattgaccagaactacaccccagccaacattcttagcgttccttcggaccttaagatcgttgcacacacgtcttgagcgtaccaattcgtgaagtatgtaacttcagatctcatacaccagtgttttagtagcattatacaaaatttagtactaattactcttgaccagtacatttgcaccagtacagaactcctcaaaggcgaactaaacgccacgcttaactaaaaaaacacacaaaacaaataaaataagggcaaagcgatttcgttctttggcaaacgtggaacctttggaaaccacaacttcgggtttggtatagtctaacctgatcgtaggcaaccggaggaataacactaccgaagaatcggtcatgcttcataccaataccccataagaatattttacgtgaatcagcaagagttgtttgtatccagttgtcaggtcagataaaaggcgcctttgcatcacagcgtttggtagatcattcggactggacaactgctaccattaggtgacccattatcactattgggtactaacatttctgacaatgctattgccacccctaatgattattttggtgactcacttaccaaccatattgacataactttgctatggcgagcgttacgccgatgactggccgcccgtcagccgcaataaatgtcaggttgttattgcacggggggtctgggcccagtacactattatgctgtctaaattgtgtgtcgtgaacatgttttgttattagggtcaatagagataacaatttaaaaaccgggtgcatattaacagagcttcgtgcataccttcgcatcacattcaaacttgacatggtgcgcagatttacagacgcttgtgtgaacagtttcagccctctggcggtgcccaccatacacacaatcctatcgatacaaaatgttctacagcatataccacagaaatccaaacttcatcgatacgtagatctaccttcaactgcggaagccgagtgtccaaatgcattagtcggaaggtgcagcgactgtcgacatcgcctttatgcagtacatgatgcctcaaaagctatcccataacagtaattcctctaagatactaattttgtactgcctacatcataatactaatttgagtggaccaaattatgacaatggtacatggtacccaaaacctccagcaaacacatgtggtacacacaggggcctctatcataggtaccttgtccatcccgttttgatcccggtatacaaaacttatcacaaagtgtgccgattaaaaagttccaagcttcagggagccccagagctgcctgatactatgtcactaaaacgaggtaatcttggaacatttttcgcggtttcaggtaaaagctgatgcaattttccctggaaccgcgaactatcttccaggtttcaggttccaagcgtttgctgaagagggccattgcgtgacgcatgtcatcgcgtacactttagctctgcaccaataccggttgttgcattcaccgtcgtgaaggtactcatggcaaacctgaaagacagaatcgactacaacgaattgacagtacatgtatatttctgcgctgtgtattcgtcgaatactattcgagtggactaccaatagaattcgacctacaactaatgatatgttacgaatggtttacttagctacattttgtattatatatatattcatttagattatacgaaattatatatttatcaaggtgcggttcaatagacggtaataaaacgtgcatcacgttttagaagttgtgtaaattgcaacacctttgcaaatagctctaccctaacaggaagtgtaagaactctgcacgctacaagaaacccaggatatcgcaggcaaaggtacacttgagattatgcgggcgaggcttggtagtcgagtgttggttaggaaggaaatccgaaagtgaattagaatgagttaggccaaactaactatcatatcggagtctcctacgcttaaacatgattcgtaccaacgcacacctcctacttccgagtattagaggctagggatcaaaaagtaaatgttgcagatcgtatccagagaggcaacttcaacctgcctttctctcagccaatccaaagtgtcaaatcttggggttccgccaatcagatcccagtattccaccacgtgtaccacaattgcctaccatcggcaacaacttcacagcaagcacgtgcctcgatacagatacacacaaccagactgcgaagtgtacaatcgcaacacccccactcaactcgcagtctactcgagcatctcagtgatgttactgtgctcgagaaggtagcgaagagtcttcgtcgagagtcccttggtcaggaaatcagcgagctggttcttggacttaatgtattccagttccacaacatcactcgtgatcttctcgcgaataaagtggtaccggatgtcgatgtgcttggtgcgagcttggtagccgacattcttcgccaacgccatggcaccttggttgtcctcgtagaacaccgtatgtccatcttgctccgcacccgaatgcttgagtagtagtcgcatccacaccacctcattcacagattcgctgagtgccatgtactccgcctcagtcgagctcagcgcgactgtcttctgaaaagtcgatcgccatcatcagcatcattccgcttacagagcgtctgtcgtctcggttaccagcccagtcggcgtccgaatacgcgacgagctccgtgccaagcaatccatcgtagacgattccgagattcttggtcttcaacaggtaccgtaccacacggataccagcatcccaatgcttctcaccggggttctccagaaagcgactcagcgtggccactgcagctgaaatgtccggtcgagttccacacgccaggtacatcagacttcccactagagagcgatacggcttcgacttcatcttggccttgtcctcctcggtttggagttcgtccgccttggtcaactgcacacttgggtcgagtggagtctgacacggcttcgcattctccaggccgaacttcttgatggtcgacgtggtgtacgcctgctggcagatgcccagcgtcttggcctccatgtcgtagtcgatctcaatgccaagtggcacgaggcggtccccagaaaattgccgacgatgcgccgtcacctctgtgacctggagtttgtatcggatgttgattggtggatgacttggatacggcgcggctgtacccgtgtgacatggatggcgactgtgggagagaagtgatttctcgggatgaatccagcgtctgaccgcagttgggcccaactggctggaagtgtaaatcctggcagtgcacgcccagaatttcagagaacactcagttcagccgcggactttcccttacgatgagtgcctaaagtctggcggaaagtgtctctggagaatgtatcccagagtacacctcatcttgctgtggctcagagtgccccagaggatcaaactaccctgagaatcaacccactaccaccgtgatcatgcgcaggaggccgctaaacccgctaaaagtgtggctttgtggagatgcactcaggcctgcaatgtagcagacttgttacccagagtgctgcatggaaacccagagtgccgcacgatgacccagagttcacctccctgagtacaggtgacccagagttccaaggatgattctctgggtttggaccattaatccagactctctatactgaacttaagtgtttcccaagccaacccctaagaatccctacagttccccaagattcctcagaattccctggatttcagaagatgaccctgagtgtcacctgattctcagggattcgagtcagttcgcagtcagtctgcaatcaaagtgatgcgtgaccttgaagaaccgttgtggatgcaaagactggatactttcgaggagtcgagagggagtcctgcaccatactaaaccaagtctaaggacccacaattggcactttcgacgccgtgcgacaatggattcgcaagccgatcgcaagattggaccgctgatcccaaggtgtactcaagacaagacattttgaccccaagcatagtaaacagaagatattttcccgaagaagagagagagaaagagagagaagtagctgataaaaaccaaacagagttccttttatcctgtactgcgcaagtgacttcggccaagcctgccgacgaaatccggaggacccgagactacgaccgcgggacgctaaggccacatcaacggcggaggacagccgtctgtgtgggctccatcaaaactcaagtccagttaggtggggaccagcgacggccttgagcttcctggagtgatccatctattccatatcctagttgggtcacttgctgtgctcgtggtagcccatttcatattattccagagggtattctggggtgctaggtagtcgcctccaggattttgtattgactgcttgtgtgaagggaaggtaactcatagtgattgtattttcctcctttattggaggtggtgcgcgtttgtgtgagtctcaggggagctaggcccctgaatttcagactcgagtgagcctagtgtgtgtgtgacccaccgtccaagggtccaaaagaataagtgacggctagttgtggtgtttgtatactctgtatttgttggttttatcgagctaggagggcatttgggtaaggtgtcttctgagttccaagtcccagagttgactgaaatcctggaccctgaattcgtgatattcggggtttcaggggatctgattctctgggtttgccttttggtgtggaggtgcgttctgaagtagacgtgcgctcccgcacttcttcgaggctacattttcaaccggtggagtgccgttccgtcgaagacaaacgagccgacagggattacacaaggtacccacgccaaccaaggagtgtgattctcagggtttgaagctttgcagctgcgaatctctgggtctatcttcttgctgttgactctcaagtcgattctctgggtctacccctggggaacagtcttgggctgcgctatacgaacccccctgggcgataaaggtttcatcggcctcgcctcacaaggatgaatcgagcgcgtccggggtccttgatgcgaaacttgtccgcgatgcctgccttcaccgagtcaatgactgtccgctggcgagatgcaatcagcatgtcatcgacgtagagactcgtcgtcaccagcacctctcgtgtagacacatggatcggcgtcggcagcacgaaatcccatgctcttgagatgcgcgtcgatcgtcccgttccatacgcgagatgcttgcttgagtcgatacaggctctgcagcagcagacagacgacgtcatcttcaccttgagcttcggccaaatccaggagttctcgaagtccatcaggcaacaccatgtagatctcctcttcgagctttccatacaggaacgcagtgtcgatgtcacactgctcaatttcaattccgtcggcgcagcacttcgcgagtttctcacggatggagttcaggtacacaacagacgagtaggtctcctcgtagtcgatgccatgtcgctgtgagtaccccttggctacgagtcgagccttgtaccgaacgactctccccgtctcatctcgctttaatgcgaacacccagcgacaaccaatcgcgcgctggtgtttgggctagggcaccaacttccataccttgttcgtcatcagcgacttgagctcacttgcaatcgctgccttccattgggcacgatccttactcgtaatcgcctcttgatacgaccttggcacctcctccgttgcagccatcagcattcctccgtggatggcatgctggttgttgtccgacttggcgcgaccttggttcaccttctgacgcttcgtcctgatctcggatggcgcagtgacttgtttcttgcgacctccgggctcctcaggatcgttggtctcttcaatatgatgagcacgcgacgagtaatcataggtcgggtaggatatggaacgattgctccacctgtcgacacgtcactaggtggcatagtcgggtcaccaacttcaacttcagtcgaaacgtcgcgaatagtgcaccactgcaggtaccgttccagaactggggtccgtagcaaccggttcttcatcgtcgtcgatctccagaagtgtcatcaagtggtcgggttcagtcgtctccatgaacttcacggtgcgcacgatttgcaccttacccgtcgccacgttgagaacgcggtatcccttcacaccatcttcgtaacccaggaaccgacacttgaatgccttcgcgtcgagctttcggcgtttttcatcggcgatgtgggcgtagccaagtgcaccaaacaccttcatgttttttgagcaaacgcttagcacggtgcacgatcgcgtggggtgtcttcacggtcaccgaatttgggatccagttcatgatccaggccgccgtgttgacagattccgcccaccatttcttgtcgatcccttcagggtagagcatgcagcgcgccatctccaccaaacttcgattcatgcacgcagccagtccattttgctgaggcgtgtacggcaccgtcttctcatgtttgatgctgctgcggtcgaggtaggccttgaactgcttgctcgtgtactcgccgccattgtccgaacgcagacgcttgatcgtcttgcccgttgcgttatccattgctgccttgaagatcttgaacttcgacagcacctccgatttcgccttcatgaagtacaccgtcacgtgtcgtgagtagtcatcgatgaaggtcactacgtacgtgcaacctccaggtgtcttggtctgcatcgaacccaggacgtccgtgtgcaccaagtcgagtacaccaccaagttgtcagggtgacgtgggaagtcgtcagcgtgcatcttccccatgcaacatccagcgcacacgttatccgtcgacacgtcgcctccgatgcgtggtaccccatcggccatgctcaacagctgttcgcagcgcttgtacgggatatggccgagacgggcgtgcacgacggcccatggctccttacgagatgtcgtcgccgcacgacacacctcgtcccccactgtcttcagcttgtagacgtatccacagcgcttggcctccatcactgtcacgccaccaaagtgaaagacgcacttgtcgttgctgaattgcgcgtcgacgtccttctcggccagcttcgacaccgagatggggctcccatcaacttccgggatgtacagaacatccgacaatgtgacggacgttccgtccatcagcttcaatccgacggtgccctttgtaactgcgtcgatcttcgtgccatccgcgatcatgatgcggaccggcgtcttcagctccttcatggacacgaacttgtcccggtcgctggtcatgtgcgagctggcaccggagtccacaagccactccgacttcgccattgcacccgtagccatgaacgcgaagtccaacgcctcctacgcgacttgcccacgtccctcatcggctttcttcttatggcactcttgttcctagtgcccgagcttcttgcagtagaagcacttcacggagaacccgcgctcgcggaactccttcttcgttgcgaatgccttctcccgagccgatgtcgaatcctccgagacttcaacaccagacagagcttggatcgcgtacgccaacgtcatgttcggcgtgttctcgagtacggtgctgatcatccggtactcgtccgtcaaactgcccagcagcagcacgagttggcgagtctcgtccagagcttcaccaatcgtctccatttgcagcaccagctccttgaaccggcccacatgcgccgcgaaccgcgtcccgggctccatcatgaaattgtgcaacttcttggtcacgacgagccgattcttgagagtgttctggttgaactgctcctcaagcaggcgccacgattcagcagcggttgtcgctccacggatgtagactttgtatgtgagactcacggctccagcgatcacaccaagagccttcagatcgtcggtcttccactgtaccgtggaacggtcactcagctggtcgaactctggcttgacgatgggggccaggagtccctagtgcgacagcttcatctgcatgttgaactcccagtggtagtagtcgtcttccacgagcttcacggtgtctgcgtagcttgggctcataaccacttgagattatgcgggcgaggcttggtagtcgagtgttggttaggaaggaaatccgaaagtgaattagaatgagttaggccaaactaactatcatatcggagtctcctacgcttaaacatgattcgtaccaacgcacacctcctatttccgagtattagaggctggggatcaaaaagtaaatgttgcagatcgtatccagagaggcaacttcaacctgcctttctctcagccaatccaaagtgtcaaatcttggggttccgccaatcagatcccagtattccaccacgtgtaccacaattgcctaccatcggcaacaacttcacagcaagcacgtacctcgatacggagacacacaactagactgcgaagtgtacaatcgcaacacgccacggacacgtcttccaagtccccgaccacacacagcatcggcgtcaacatgtccgactcgtccgttatacccgtgaagtggccgaaaatgcaatcccattggaaccgcacccagccgctcatgacgatccgttgccccagtagattgtccaagatgaaatctttcttgcttttctcttcgtctacgtagctgctgcacaaattcgggaacacgttgtgtagtgtccgcttcgagacggtaaagctcgttgtgaccgtcgcgatcaacgtgtcgggcatatgctgctccaaccgctcgagtactatttcagcatcctggaaccagtgatagaaccggttcggtttccactccatgaacaccatcaagacataccagcagtggttggttcgcatctgactcatacgaacgacaccgtggctagctccagccctacactcctcccagctcagcaagaggtcgacaggttagcccaccattgaacgctttgtcggcttcggcagttccggtaccggaagaagaaagaccaactggcgacggaccttgagcgggacaacaagcagcttcgtcaagttgttcggtttctggaacagcgtctacagtcgcccctaccgactcaaagcacggcgtggaaagcggcagccacctatttccacgtgtttcgccacggttgccagtggccttcggtatcgagaggaagatcgaccagcgaccagttcaagttcgcacaagctgccatggctcaatatattgcgtacaacagcgtggtgtagctcgttgtgcccaatctgtgttgctggtagctttgacgcgctgggccacatctcggatcacgccgtcacttagtagctgaatgttttgagggacgaggcaactggagctcatagcgctgggtttgaaattgcagagtgacaagtatgctgtggaaagtctcttagtcagcgactatgtaggcgttagctctttggttgtcaccaggtaggagactacctatcatccgtgtggtctcggaccctcacgttccacgtgatgacacgctcctgttatgacacgagtctcacgttttatttgattgccgcctccttggctgatttagcctgcgagttgaaacttgcgacctaccgccccctctcggtgcgtcaaagctcaggtgtggcccagacttcgtgctcacaattcttcgtcagccacacaggccaacatgtgttacccaaactaaaattatgatggcgtgaaatcttggggtcagctgtcccgggttaacccttttagaacttgcagtcatttgtcggctgtctactttaaactgagctaaacaaatcaaaaactcaaatcgacttcaggtcgggttacccgtccgatagtttgaacacgatctagctcaaatgctggatgatatccgaaagcatggggcttccgatacactgtcttgacggtatccgggcacactgggcaggatagcccacgccttggctcgtgcgtagagctctgcggagcaccaatcgctcatcccacaaccgatcaactcctacttacttaccagcggctgcgtcttgctgtctgttgggcgggccttctgggcctcatccaaccgaagagctggactacgacagcgtggtgccgcttcctgagacgaaggcctcgaccaccgaatactcactcgtgctgacgttcaagcccaactcaacatcaacagtgggtgccatccgtacccggccgtcgatgcggacgaaaacaccaacgctggcctctcgctcttcagctgcaaagggtcgtctctcggctcccaagtctacggctgtgtgacggcctacgaggattcgtacgctatcatgtacgcctggtacttcccgagagaccgcaagggcacgttcggccactgccatggctgggagcacgctatcgtgtggcttgagagaaagggtgccaaagatgcgaacatatcctccgtgccggcctcgatctcgaacgacaagtacttctcagtcacacccccggacaccgccatggtggaagcgacgagcgtcaagttccagtacaaggcgaagaccttcagccactatggagtttggacggctccatggatgtattggtgcagtggcgggagaccccaggcaactacgaccgctggcgcgacagtccgtcagcagtatgtgtacatccaggcgatgttgacgctcgagttgcgcacccacacggcctccgcagaacgtcacggccgaggccggcgacttccagcacttggccatgtggaaagacatgccggctgcagcgcgcgcggcccggaaactcaacgacttcggcagggccacggtaccattcaatgagggtacgtttcttgacaacctgaaggaggcctacccgtggtagagttctctggatatttataggggtaatcacggttggaaagtatttttgggcagccaatcaggagaaacttttgtgtcccggttttttcagctcaatcctaccagaaaaaatcggtagatttcaggcggaaattgacgtgataggtggactgagccatgcatggatagtgcggttggttggtggtggatgtgcactttcctcgcgctacggggcgctcacagatgaaagctgaggtttgattttattggcgcctgaaacatatttagtttctaaccgtgataacctctgatgattttgtatttgttgcggtttagacgtctatctacgcccgatactccatacagctgcagcttctcctaccgaacacgcctcctgaagacacgagcccgcggtagtagccaataagcaaaatgcttcctgagtcaccccagactgcactaccctaatgaaaaacgaaaatataaaagtgtaacctatgtaaggtgagacttcttgagtctcacgtgtcctcttctgctctactctggagagtacttagcctgttaaaatcccacgcgtgactccgctcttgaatctgatctctgcgctcaccgagctgacgcgtgagccgcacttgtgttgacttgcccattggcggcgtcgagtcttgatcgtagtgtttacatcaaccaaaagtggttgattatcttgctgcacctggctttccctgtcgcgagtgcacgtgtaggtccaaaattcccgtaaagtcatccaagtccgtcggataatggcgcggtggagacgttgtgcttgcctttgtgtatacgagatcgcctctgaccattctgtactgctactcgtcatcgttgggtacctcctccatccttttggttcgttatagacggcccggttcaggcgatttagctgatgtcggacactagcccaccacgaaggatatacttccgtctgtgagtcatagctgaaaagttgagtatcggatgtcgaggtaagccagtggtgtgctcggtttgaggtctctccagcagccaatcatctgagaaatgcagtctcagagcctgcgcccagcacggcagtgcgcatttcgccacatcttgtacactgtgccgctgcgagatgaccccaatgagtatggccactttgcttttctgatacacagtcgcaaactggaggcttccttgttgtagaatggagtggaccgtgcgcagagtaatctgccccgccggaatcttcactgtccaaacccagttaattgattcgaggaacatgtgaccttctgatccaaagtaggttgcaacccagtagaccggcgttcctcttctaatctgcctctcataccgcgaaaattcaggtgagcatttatgcccatagttgcaactctagacgaccccgtcttggagttgtcaccaccacattccaggccgtctccttcggtgggacacctaacgaaatcgcttgtcgacgttgctcgagcctctggacctcgcgttgaaggtgttgggtctctttgtcgaggccttgcgccagtcggtccttcttcttgcggtgacctactaaaaatctctggtagtgaaagggttaaacaagcagaacatcaccactcaggtagagtgaggatatatagatccgcatgtgcatcgggttgcttccggtgccttcttctcataagcggtcatgtctggagtctgtgccgtttcagattttgtcaagtacagattcctctcctgcttatgatactgtatttaagaaaaagttcgtcgtttaacctaaaatacacatgacaaaataatgagttggatcaattatagtcctgttcttagccgttagatactagtagtgataaatgtagttgaagtctttcgagactgcaggaccgccatctccatgccgcttgaatgcagtcgctgattagtccttgtttgaggagtggagggctcgaacggactcgcacacattcgccaggaatagcaaggggaagtcgcggtcgatccgacgcagatccagcggcgcaggctgctcagtcggtgtgccgtatccgtgcagcagtaccgtcaacgcctcacctggaaccggtccctgctgctgctgccacgacgtcttggtgtcttggcggccagcgttcttcttcttcggacgacgtttgtggtgggccgagcggatgatgttggcctgctcggcttccagctgctgtagtctggcgtcgaggtgttccggggggctagcagcggataccgtaggccttcgaactgcactgtcggtgtgaggagtcgacacgcgatcaccctcgagtgtagaggccgagtatgcgactcgctggtctttcagctcggcgatgcgtcggcgcacggacgagagctgtcggtacggccacttgcggatgctgttgcgtctgcagatgcgcttgagcgcagcctcacagatgccgagtcgttctgccgcctagtccggaggcaacgctgttagttccgaagccactcaatgacgcacgatagactccgtagcagcagcttttgttcgcatccaccacactagctaaccactctgaggggttgctgatggaggtgctcaccgtcttgagggggaggtggtagactgcctggagctgctccacgtcgaagtggatgcgctgtcgacggcgtctgcgggttgccccctcggcttcggacgcgcttgctgttgagtcttctccctcgtctccttcgctgtcgttggcgccctcgtcgttgctgggtgctgctgcatagtggtcgcgaccgctgtcgctgcaactgctgctgctgcttgcgttgcacaccagcgtcgggtcaggaaggggcctcgcggagctctcgagggcagcagatgcagaccaagtggcgcgtggcgtggagctcatggtgcgaataagattgagaaagtggagtgaatgtcgttgaagtgagccggatcgggtcagctgagctggtttggcgtcctccgtcgaagtctttcctggagtttgatcctgagaacgcgagcattctgcagctaccagcaaagaccaaaatggtttccgagaacgcagcaagtgagctcaagatcttggcgagtaatttggagctgtatctggattcgaagggatttcaaaacacatccctcgacgaggtttatctacctcaagtctctcctccgatggtgtcgctgacgaggtaatctcgatttcgcttttacatgactcgttctttacctttctaaagctaacacgtctgtaatgctgctctgtagggatatttcgcgcatgatcgtcagtgcggaagtgccaacgctggccaaacctcgtccctgtgacttcaatgcagcagccaccgggagcggcttcactatgggtgcagcagctttctcctcaagtggcttcatgtttggtccagcaacgccaaaatcccagcaagagaagacacaagaactaggcgagttcgagctgcgactcttcttcgctatcacgactcatgcagtggcacctctactccattcgctctgcgatgtgggcgatctcgctcgacgaatgcaggagtacgtgttttgccacccgaaggtgagtggcagcaagatccacgtattctgcgagagcacggctgggaagcgcaagaagtacacgaagttggtgaagcacctctccacagctgccgctgcgcttaagtccacgcccagctgcgtgtgattcatcggtgacgaggacggttcgcagtctgtgtcaagtgcgttgtgcgtgtcattcaaccaaaactccatcaatatttcaagaaataaagctcaaagcctgcgttgatatttaagtgttcattatacatgatagctgtagcgagttatcgactcgatctccactggaagtcgggcgagatgatagaccggtcgaacactagcgacgcgtcctccacgctgccaagcagacgcagcatcggcgtcaacaggtcggagtgagccatgacgctcgtgaaacggccgctcaagccgtcccactcgaagcgcgtgagtccgcgcatgacgatgcgctggcccagcagtcggtccgccagtctgcggttgctgctggagctgcacaggtgcgggaacacgttgcgtagtgtccgctccgtgatggtgacgctcgtcctggcgatcgcgaccagcgagccggccgcgcctctgtctataccttcgatctccagctccacgtcttggaaccacattgacaggcacttccagctcctcatcatcgcctccacgccctgcccagagttgaagaccacgtcagggaccatggcagtgcgcagtaagtcgatctgggcgttggtaggcctaatggcattggagcatcctcgagactggaggccgtaccggaactgctggaagtattccaatgcaacgtcccacccgttctgctgcgccggcaaggcggcggagatggcgcgacgctgctgctcgaagctcataatttcttcccgtagctgccgcgtctccttctcgagactggtcatgcgatcgtactccttcttctgtctctcccgacggtagttttcttcttctctgtggtagttctcctgcttatcactgttgagagactcggtgtccgtctcgtgctgcggagtgcaggcttccgtctctacatatcgcggctcgcgactgggatatctctgtgggatagaggcttcaggctctatgtatcgtggctccttactggaatatctcgcctctggctgttgagtccaggctttagactcgtcataccgaggctctacgttggtactgggactgtagccttgcggctccacgtaccgagacttgttactgggataactgttcttgggcgactccgactccctcttcctcttctcgcccgttagagacagcaggccaagcactgcaatggcgtctctctccgggatgatcgcgccaggtctggtcaaagtattgttggtagagttctgtacttggcgtgcacgcgtgtactctggagcctggggctgcacacgtggctgactcgactgacgccactcattattattggcacgaactgcactgtgctgatagttgtcggggcggaagtatcggcccgagctccggcgctccacgactcctccgacgatgtcgtcgctcaagaaccggtcgttgggtggacgcagagtgcagaagttcatactgttacatgtagtcctcgagtgagacttggacctgttctgctctggtgtcgggactggaaattgagaaatgaggttcggaatccagacaatctgcgataatgggaaggataggcgcaggaacatctgcccacaggcagtgcgttttgtatgggtcagtggctaggagcagcgtgctgcctattcgttttgtagtctcagcgtgatatacaagcgttcagctgcagcagctggcctgttctgcgcgatgggcaatgcagatcactcaaaagcgctgattgaggggttgtttctgctcatacagtacagtaggaaagcaaaaacatactgccggcaaagcccaaagctactcttgcacaacgacaccacaactctccctcaagccgcgggcgacagtacggtaagcgaagcgtaatacggtcggtcgtctaagatgaggggcgtgattaagcaagtcaaccgcacagccatcattgtctcaacacgcgcgcggcatcgtttgatgtacggtaagcactgaagtacaagcgctgcgctagccttacgtcggtggcggtgtgatctacaatgtgcgggagcgtctgcttctacgccaggcgcggttgtagaaaaaaatatcgggttgcagcgctcgctacgctcgctcgcgcagaccagccccgcctaatcggcgggcgttggaaccagtgaatgtactgagtgaggctcgcgctcgcgtccgctcgccctcgcccattcctcaacagatcatgatcaaatgcattgtttatgaaaatggccttccttggaaatggccctctttacccagtcccgccacaagggcgttcgagcaaaatacggctgcacacaaccagcaaggaacatttcaacgcgcaaaagcaatcctgagtctcagatgcagcggctaatggaactccaggctttacgtattgcagagttggtgatttacggcgcaacaccttcgatcactctactggaggagtagctaactagctagctagctaagtatctctttgtgtccgcgaaacctgaattactccggagattacacttccactatgccactttgcaacacatgtcttgcccgacactctgggcaactcaagcctcgacggatttctcaaataatttgtaactgcactttgctatttctttctcggcggcttcatgctcgtataaaatgttgatactacagtagaagagctctctatgtgccccgagtctactttgaactacacgagggagctaagctgcctaaggtcttgggatattttaatagtgcttcttaaaagaagcacttgaagtgaacgtaacgataacggaaacgacagcccttcaatctgcaggctacaaatgaaaaggcgtggtgctggcctatattggaacacaatcttacctcgacgagtagtaacgaattccttcgttcctatcgatatcgatccttccattgtattcctgcattgaattgtcgggaatcccaacagtccaatagacgcgaccccgacttgagatcgcgtctaacttgcgtgtttctactgtagctctttgtgctgcaaattatgccattttgttcagttttcccccaagccatacgtggcatgttgtgagggatggtgcgttcattaggtacagcgccgaatgcataatactggaaagtatgttattattatctgctatgctattaaatactaaattatgctaaggtgtcaccgaggtgcttcgtggcgagaagtcttgatgctcagagcctagcactagctaaccgctgtatcagtccgcagtaccatgacttgaacttgtacattagaactcaaaccgagtaggtgatctattgcgaaattcgttgttgcatttgtgcccactcagtgatttggttcgttgcaaagtgaaatggtgggataagcaacaaagcaacggagatttgatatttcattcagtattttacgaccatactcggttctaatcgagtgcatggcacacacaaagtcgcttaatctctcgggtagacagactacttagactcacttatgggttaagaagctgaacactgtcgcgtcattctgcacctgctccttcgatgtcgcgacggatgcggaacatgctgcggatgaggactgcaacgcttgcggtcacgcttcttcgcatcgaagctcgcggcaggctagcagcagacgcacgccgtgcaggctgggcttcattgagctgaattaaccaggcaactgtcgactgcttcttcgcggggcgctcgagctccactgtatgcaggcatgtcgtttgttagttaaccaggctacttaagtacacaagtggccactgccggtgatgtcgagaccggcgccaagtaaggccagaagtgtccagtttgaccgacaagtacagcgtgctgggtggttgcgaagacattgggcattttcccaggtctattgtgaaatttccgatatagcgccaaactaccgattagatcaatcctacgccccaagctaagctattcagacttgctaaagtatttaacgaagatcaccttcaatagcgagtagctaatctcggttggaacgacctcagtcttcgacaagtgtatcataacaaaatcgtgtagtgctaagagtctgatagagcgctgacaaactcgttttaaggtctattctgcagtgtatccggctgcagatactactatgtacagggtagaaaaaaaatgtacggtatattcagtttagtccatatggattcccgcagaagttcgcggaattttgtgaggcttcctgcatacagaattattaatacgacgtaggcataatctatcctcgtcgttattctgttctgggaacaataccatgcaagacgaagaaagctgtctctcgctcgtgcactgttgttgggcctacacgtacagtattggtggttggcttgcggaattcacagatcgaagttgcaaagttgcacgtcgttgtttgatttactgtaccgtacggtagcttcgatctgcacatttcgacagatcaagtgaatgcgtataagagaggcggcagctttcgactcgctgacttgcaaacacaccgtcaagtgtaggtcaagtgtttgagcagcaccagactcctcggacttgatcaacgattccacacaccgcctcgttgtgactcgtcggcgatgaggaacgtgccggcaggctgcgccgtggaggaggttagactcccatagcgagaggaagaaggaaggatacagagtggctatagcgtagtagggcgatcccagaggcggagccagccttaaaaaaatgggggagcatagattttttttaaagtaaaatccacaacctacatttcgattcttctttttgtcatcgctttaaacttttcgaggaccgagtctttgtcgatgcagtttgtaagatcacgctcgatagccaaaaccatcaggtttgacatccaaagatctcccattgttgttctgagccgcgtcttaattcttttcatggctgagaaagacctctccgtagtagcagttgttacaggcagcacacgcaccaagttaataattcggtgcaaggtcgggaacagctcgttgttatcggtcccgacgagttggatgcatagttgttgcgttgtcttcaaattttggaaccttttgtcgatctttgccaaattgcgaaaccgagtggcctcttctcgaaggtcgtccagctcatcggtgaaatcatcgggataaaatgttttagccagctcaacaattttagtagcgctccaattcttgaaattatcacgtggactgagcgatccgcacaattctatgagactaagaacttctccactaaatcgtgaatccatttcagaaatcaggttcgaaggatacagctgtatacttcgtcacgatagtgagcttcttgtgtaggctggacaccatccctggaggagtccgctcctggaattccagccctgccacacccccgacttctcattccgcgtcgtttccacacgtcatttttgtcaggaatgagaggggtgtcgtcaacttgtattgatttgcaaaagttgaccgatgagttccaaatcgattcaaaacttggcgagttcccagtcatagaaccatcatcgagcatttattttagtgctttggatacctgcttcgtcatattcacagctgacacgatatcgacgtcatctttctgcaaaaaatgggacagccgatttgtttttcccaaaactgcagtgagaatctccatatgaaatacgaagtcgaaagttcacatcttctctaaaattcctgacgcctcagcgcgtttgtgggggttcacaccatcgaccactacacactctaacacacttgtaattggggcccaaagcatcttgacttttcttaacgcgcgaatgtagcaattccaccttgttttgctaagaccctcggtagaagttggttgatttaaatctctaccagattctagatgtccttgatcaagcattttttccaattccacagcggcttcgtcaagaagttgatctttccttttacacgaagcacttacagtagtgtgaatcccttgcacggtgtcgaagcattgaaccaccgagaccgtgttcatagtcactgcaactaggacgagattaagtcgatgcgcgaaacagtgaacatagtaggtgtaaggacactgggagcgtagacgtcgcggaagaccagtaatatcacccgacatgttggacgcaccatcatatacctgccctctacagttcgccaaaagcaatccccacttctctaactgcgttatcaaaccatcgtacagtgtctccgcattcgtattgcgaacatggacagttccaaaacatcttcctctaatagtccccgttgcagcgcacacaaaacgaattacgatagctatgtgctctttcttcgccatgcagcttgcttcatccaccagaacagaaaaatatccatctgcaatctcgacctccataatatgctttcgaacaacatcagccgcacatttgatcagttcacgttgaatttgtggcgatgtgtacacaacgttttccccagctaaggacattgcgcgagaaaacgatggcgcgtgctgtgccatgaactgaacaatctcaagaaaattgcctttattttgtgacgtatcctgggcattgtaaaaaaacgttagtctagtgatgccaattcttacatcaaaattaaaccgctcgtataccttttcgtcgctgccccgaaatgcaatttcctgttttgctaggagaaggcagatttccagaataaaagtcaggcgctcccggtcgttcaccaatcttttgagaattcagagccacaccaacgtcattctgacaggatctccgattgtcgaaatcgatcagagctgagtggtgcttcgagctggtttttgtcccaacatgttttgcaaatccgtcttttgtagtggcccttttccagttcctatagcccgttgtaggttgtgcatacactgtgagctcgctttgctgcgtcattacttctcggctgaggtagcagcataagcaatacaccgcgtccgtcgaaggagagtattcgagccatgattttttttcaaaccactgggcccgaaaagcacgcatgcatccaccgatgtcacagaccggatattgcttgagttgcggttggtaaggaccgaggcgaacgtaggattgtataacgtcacgtagtagctgaggatcggcaatcagttgcttaacgaaaaataaatttggtggtctgtgagtaggatcccgcctaacaaagtctccagcacggaacattctgcggctctatcaggaattttgttgagcgcacaccattccaacgctgcttgtccttgtttttcgcgcagcgttacaggttggggtcgtggcccaggatctgcttcaatactgcgggccttgtcaaagtcttcgggttcttgacggggcttcttcacaaagaaggtcgtgattaccggctgcttcctctttccttccatgttattatcaactaagcggaggaacagtgtgaacttcatgcatgtgccgtctaaataaaaaaatctaaataaaatcgaaacgccttcgccgaaaaatggggggcatgcgccccccattttggccctggctccgcccctgctagcggggatcgccgcgatccccgctagcccaggcagcgaccttatattcatacataagacggaatggaatctcagttcactcaatcgcaaacacgccgccacgccgccgtgcattgctgtaacgcgtagatgtgcaactgaaaccgaaacgataagcagaggaaacaaacagttatgatgtcggaacgagcaagtacagacgacgtgttggcacgcatcgacaaggcagtcctgctgccagcacactctctctgaaagacgttgctcagcacgtagggggtgtgccgtattatggggacgaaccccactccaccaaccagacaggtattcggaacattagtaccatcgtgtcaccatcctgaagagatacatggcgcatggtcggggactgccttgaaattcgcccgcccgtaaatgctgatgacattgctcacactactttggtatcggcggtcactcagttcgcaaagggaaaacaaaaatctccaggcaaaggcagagttcaaggctaggtaatcgcgatcaaacatcgaatttttcttttgaatgtatgaattgactactattaaagtgccaagcttcgttttacaaagcgctaaaatagcttcatttttttattagtgtactgctgctgtctatcacacagcaatgaatcgaattacgatatatagtacagtcgagtacatgtacagcgcacgcacgctagaaacgatgcaggtatatgcagctatagttgtcgaaccaagcacacttcgacttcgcaatcgcatcgagccaacgagactgctgtactgtaggcactcgacggcactacagagtacatggtgtagttgctgtataaacgcagagcgagttgtgttgttgcaattcaagagtttaggtgccgtagtcggtctttatttttgccccttgcaagtgtggtatatattataacatcttcatcctttcggtttttgcagcaataaatattttattgtgctttgcagttattatgttgccgacgattttaaaagctaaatatggcaagctgcacttaaatatgtgtgaaagaaaattcatgacttgctaaaattacgcataaatccacctccatatatagctctcgaccgtgtggagtcttttcagcggtcattcattggcccagtataccaccgctcatgatccccagcaccccccaccttcttacgcataattgccgtgtgtgtaggtgcttctggataagggccgacagaattgcagcagtacagccacaattccactgtcaagagcgcaagtatggcgcttttagcgtaattctaggcctccacccatttatgcacctcgatttatcgtaaatctagcaggtgatcgctatatcgcctcgtattaccggcaaaacacaactagggcttcgcggggtctgagatagcaaaaataaacaaaacagataaacgcacagcgcacacgacttaggcacgccgcacttgctgctcaccagtcgcccgcgctgtgcttttatattatgagcatccacatctaccagataatcagacctttaagtacaataacacacttacgataatatcaatttgctttcttgcctccgcgctgttttaataaccaaatacaagcaagttataagctgcagcaacgccctcccaagcagacgactattcttaccttcgtgctgtaaattcaccctgatgttgctgcgtcttcaggcatgagaactggaaatgattcgaatgaaacttgatgatgcgattgatgcttcttcattgatagagaccgactaggtaattattcagattacctataaagtttactttcataatatttcaatatatgatggatacttaaacgcatgcgttacacgcacggcttcatgcgacaccaaattaatcctgtgccggctgcgtagcagcataccttacggtacactagctatctcagtattatacttaattaatggccttagtattaaataacatttgtaaaaatgtcaacttccgactatttcgtaatacacgacagaaagtattaactgttgaagtgcggaaccatgaactataagtgatgaatggcgtgttgtcgtgtttgacaccctgttaaattctacaggacatgtaccgcgaacatgctacccataaaaaaagaagccaaagttctaacgctgtttaaattaaatttgattgggctgtgttcgagccgtaatctattttttcttaccctctgaccagttgaacctcttaccccctttgcatacctctatataaagcaccactgcagcgcttgatatcataggcgctatatcataccagttcagcaggaaaaaaatgagtcgcggctcattaatccttaaattgcgtggtggggccagctacttgctctcgctcaagtgacgcggtggtgttgcattgtaaaaaaatatggtgacgctggagacaacccatgagggtatttccctccctggctctctatgatactccctttcacttatttctcgaggtagtggcttaattatttctgtccatacatatttttcagtgaggctgggcgcaaggaattccgggtccatgatctgggaaataaaatagcgaaccaatcaaaccctatttgctaaaaatagatgagtgtgattggacaaaacaccgattggctcaaaagttcatgaattggtacagtaaaacaatccgaaaaagcacttatcttttatttgtggctttcactctcagctcagtagggcatattttctgaaaggcattcatgtggaccatgggggctctagttgaggcatttctgcctctttcccacaatccggagttttgaggcgcattacttttcgaaatttgaggcaccgctaggggtttcatacaattctcagatgtagatttttggtgtggtacacgtcacttatggcatcgcgctgtaggcattcgaccggcctgcagatactctatgaatcacttattactacgtattagtttccctgcattacactaatgcatgattcctactacagcacgcagattgtatcagcgataggtggcactaccttgactacaattaacgctgaagcttttgtttcgtttaattattttgcggctgcgccaatataagtcactagcgagtgttatgccagtttgacccatgttactgctgtcttatcgcttgcattcgattccattgaatcttctagtcctaataatgctttactgtaggataagtagtatttggccggacacccgaccctatgctaagcttgccacctcgctgtagccaatcagtgatttttcttatcatttgaggcttaatgacctattatcatccaatcgtcgctcattagggttaggtttattccgttccaacttatttctggaatccggaatttcctgcttcgtgcaaattagtaaccatacaaaactaaagatgtttctcgttcttactagataagcgcaatacctgctggatgtagccacattcagacttgcccaagactgacagcgagcttctcgtggtctcgacaaccgtcgctggaaggtcaagaccgactccaacacgcaaaacgctgtagatcgcttctgtggcgagtaaacgaaaggcagaataagcttagtagatagctaagatgatcatcgaacttccgagttttgcaaaatcctgtagtctctactggatctcgctacgcattggtcgtctcgatcgtccacgttgggctgcctcgccgccacctctacttcagcgtcttctcctgctcccgctcggactgcgcggcacagtacagcacccgggtgtgtatggtgcctagaccagcgtctcgtatagtccagcccactccgcgcgcgcctgttcctcctctgtgacttgtcctcatgcccccccccaccgaccctcctgcacgtacagccccttgaccttgtgctccagctgtgccagcagctcctgctcttggcgggaaggcgccatctcgatagaaagcttccttgaccttgctctcgaacttcacttgcttcttcgtcgtaactgttgtaatgcgatgcgggtcgcgtcatcgctccgacctcgctgctcaccgcgctcaccgccttcgccggcaccgtctccttcgtctcgggcggcggacgtcgcttggagcgggtgacactgacgtccgaactgatagcagcagcagcgccgacggcacccgcggccaggccgttcactttttgctgccgtcgagagcaacttgacgtcacggttgtgtccctcgtcacctccgtggccctccgtcggccgcacttcactcaacgcgcagccccgcttgtcaccgtatgcgcctcgagcttctccgtctcctcttccttctcacatgcctactccttgcccggcaccaccgccccgtgcgcgcactactcctgcagcgccttctgcctcacatcgcgctcgctatgcgctgcttgcgcatcggtatctaccgcgtcgcctccatggcgtacagctcggcctcgacggacaggctcctagggccgcacggcgtcactcagcacctcgaagcgactgagcatccacccgtcgcgcccgcctcctccttatgctcgcgcggtcacgtccagctcgcccgccggagcgtctcctgccggcactgtgctctgcggttgttaacctattgcgagagcgttacccgaactacatggctgacagcaagcgaatcgccaagatttgcgagaagatggcagcagccatcgacgagcgaaatctgcttgccggtgtgcagagcggggaggctcctggctgtacgctgagcggtctgcgcactctagtccaggaatttgcagttgcgggggttggatctgggtttaaaagtttgcatgactcggctattctaacactaatgtggcacacgtttggccgtgcaatagatacttgctttgcgagaaagttccaactctccatcgcctcgtcgggcgagctgttcctacatgtggcgcgcatcaagacatcggtcgtccaggggatctctgtctacaagtcagcagttcactgggagcagtgcatgtttcatgcactgggcatgatgttcgtgggggcgtcagaaccgtcaagctacatctttcccctggtgccccacgctgaatcgtctgagctaccaggggagaaaacctacagtcaagacgaggcgatcatgtactggaacaatttagaagacaagcccagctccaaagaagaaccaactgcaaaaagagtgcgcggtcgcccaaatgtacccaaatacattaacgacgtcattacggagatgactgagcgcgtttctaaggctagcgcaccgctgccgccggccatgactgctgggctatcaagccattctctgcgacgcgtctcagctgcgtacgccaacgcgtcgcctaagctagccatccagtcgatatcgacgcgcggggcctggctgctggactcgctgacgaaggcttttgcctacgtcggcactacgacccgcgaaggccaagagcgtcgggaaagtgctggctggctacaacgaccctcatcttccgtgcgcgacgccgtcgatccagacgctgcaaaaggtcttgcctgcgcttgagtacgcgcggctgctgtcgctcaagacccagctcttcaggactgtgagtggcttcaccgacgtgacgctcaacgtcgacaatctagtgctggacgctgtgatggcttcgctgctcatacatctggaggaggtatccgcagcggtcgcgaaggagcaggcttccaccgactacacgtcacactatctctaccgtttccacatcgccctcgacaccaccaacaccgctctcggctctgggttgacgctggcgacatgcatcgggtggggacaccagcttcgagccgcctgggagacggagaacttttcccaactcggtgggagctgtggcggcgacacggctgtcctggcgtcggctgtgacccagatgctgtcctctattgctgcgatgcagcggaccttggcgaagctggtagcgatgcaggagaagagggacgtgcaagctggacggacccaggcaccaagtgagagctccacgccgccaactgccctggtggcaacaaacagcagcagcgtcatcgtggaggcgcacacgcttgccggttgcttctacaagtggtatgtcctacaactttggaacacagcaacaaacaaaaagcatcaatttgctcgagcagatctcaaggcatgcattaacatcatgttaattgcgtcaggtacccacatctcaatacctgctcagccgctggaccgtgatgggcgtatcgtatcgcctctggaagcagacactgtggacgcttgccgaggagctggacaagaagacgaatcaagcgctagggctcctggacaacaagggtcgttgcaagcctgctggatcgcttcggaaacgctggcgcaagctgcgcgcggagaatggtgctgcgttcgacgctatctgctcggcctacatcttgcgcaaagggaacggtggtatcgttgatcattgcacccctgatagtcacctgtggcaagcaaaagacttcaagtaagaggttagcggtacaaaggttagcttagttaacaccacagtacatatctttcatgtgaaactggcagctggaattgatccagcatgctcccagctaatgcaggggcgcctttccaatcggccataccagtacaacgtggatacatcgcgaaaacagcttcaaacacacgcgcagtgtccgcacgggtgctctcaacgaaggcagccaggcaccgcggtcacacgcacctttagctctctaaaccggcagcataacgcccgcccacccgggtctagagagatcattcgagtgtccatgtccagcagccagcgtatccggctcgttcgcggtcgtagttgggatggcggggcgcgggcgttcttcctctgtgtcgggtgagcttctatttggcggcggcgaaaagagaatgccacgcggcggggcgcaagtaagaaaaacctcgaggttttaccctgattgggaacggataatctaggcatactctggtcaagtcattgggaacacagccatatgattggctcgatgggttttggactgagcttgggaactcgtcgattattgttatccaatacgtttttttctattgaaaaaagcttcaagtccaaatgtatccatctagagttttgagacaccctccgatatcttgaatgaggtattcagtgttttttctacacacattgccacatctagaggacccctgcccatgatacttatacaacctctctttagcaaaacacgaagctgatggctcctataaatactgactccatatctcccttgtgtatcagaattactccagctgtagtgtaatttacacggctggttttgggtagttcatgacctatgatcaattggccagccatggttccatttaccaacacgtgtatgatcgtgctcgagcggattaagtggtagctgccccgcacgaatgcctgaccccaatcggacctttcctaggacaaacgacaactacaaatccaaatctactaccaaatcctaccttttttgggtcctagtttaacccgtattaggccttaggactgaagtcctactgtaaccagacgctcgcccgccagtgtattttttagatgcactgtaataaataaattatttaaaatatttattttaaaataataattggtacattaacagtaattggcggattccggaccggaatccggaaacctgtcaaacctgcaatagagacacactggcgaaacataaaatcacttgtgccaatcagcgcccacttattcattccggacgggaatgtaaagggctaaaattcgtacttatatgaaatatgtaaatcctctctacttgttctccctcattcggcgttcttcgaggtagccacgcggcgcggcgcgcgcagcacgacggacagctcgacggacagcacgcacacatgcgcaggcggaggcacgacagctacggcgcgcgcgcggcagcacgacaggcagcggcgcgggggactcggagtgcgcgcggcagcacggcgaacagcggcgcggcggactcggggcgcgcgcggcagcacggcggacaacgacacagcagcagatcgacggaggcaagaatgcggccagcatggagtgagcagcggtgtggtggcggtggcggcagcggacagcgacagcgtggcggacagtggcgacgcagacagctgtggatctccggaggtaggtcgtcttactctccacgcccccgtatctcagcggcagagcgggaagctatgcctccaggtcgctggttcgactccagccgggggcaatcgtgctctgtgtgttgcttgtgctttgtgcgtacttgtaggcgagcactaagccagatccgaagccccccattggcgcgatgcgggcgtacaagcgtccacaacagcgccgctggctttgagcgctaaatattgggtaccaatcgtgcggtatgcgtcgggatgcgaggtacgcagctagcgccagcgcttgcgtaacgaagacgctttgcgtgtaggtttcttttggtcgaaggagtgcagccgcgcgttgacggtggagtccatggccaaggcaagcgtccaaatctcgtctttccagtgctggtaagccgcgacgtcggatcgactgggctgctttggtatctggaatggcgcttggtaaagtattgtcatgatgttgatcgcagcctttgcctctgctcgtttgttctgctctttcttacccttaacgctttcccagatgtggttagtatacccgttgagcagcgatccctcgagcgtcgacgctgttgtaggcgatggagctgagagctcgacggcagtagtgaatgaagcgctggcggcaggaggtggagcgtcgccagaaccaagaggcagccgggtgtgcgcatcttcaagccggccgagccgctcgttgatgctcaccaattgcgtgagcatgttctccagcgtcgaggacagcagcgagtcaccgccagcagcagcgttaccgagctgcgcgtggtttgtagtttgccagtgatctcgcagatgcttaccccactcacaacatgtgcgcgttgttatacaggagcctaagcgtgagtttacagccgtgatgccctggctcagctcgcagacatagcgagtgacaagcacgttagacccagcgctctccgtggcttcgaggacggactcgtggtgcatcaagagggaggcgaacgtcgcatcgaccacgtccaacgtgatgttaaatcgaggatagtgaaagccaaggacatggcggtaaagattccagcagccacacgcctcgagttgatatccactggatcgccagcttcggcgatgcgttcgcgtaagcagctgcaccgcggcgaagagaatggctggtcatccccgaagtgatacgttggctcgccgaaggcggcatcgccttcaaggtatccccaatgatctcggtaatgtaacttgctacgtttggccgctttctctctcgtttctgcgggggttcggcccctccttcgtcttctttctgcagtctttcccagtacatgatggcgtcttcctgagaataagactggcctccaggaaggtctgactcagcaaagcgtggggccacggggaagaggtgctcaggggctcatcgtagcatatgaacaacaggccaaacgcgtgaagcatgcactgctgccagcgctcggtgacttataaattgacacgccctgtacaaccgaggtcttaatccgggcgatatgcaggaaaagctctccagaggcggcaattgaaagttgttgcttgcgtgttaagcatgtatcgatagcccgcccaaatgtatgccacatcattgtcaaaagcgcagcatcatgcacacactttagaccagttgtcacatcggcatgagtcacgagaaattccactagtccacacaaatcatcaattgtacaccctggggcgtcattcgtttgaacgatggcgcgaagattgcgttcctcaatgtgacttgccatcttgtccctgatttttgcgatcctcttggagtcggttagcgacgtagtgtagcgctctcgtaggagattgacgacttgtgagaagtagccaagagctgttgccttcgccagttattcgtcggcagcacgggctctgttacttttttgagttatgaagattgaaaaagctgttagcaatgaataaaagttttgagtaggtagacaagcatcatcgctatgcgctctatgtatatcatcgagcgaagccttagtcaggcttatggagataagaaattcctcgaaaagcttctcggcagctagctcctggctgatcgtgccagctggagtgtcgtgtaggaaaacacgagtttacgagtcctcgccctatcaaccgaagtctctaggacgagccctaccaacaacacacgccgtctccgaagattcggcgatagattgtcgggataataaacctgaagaccaggtccgatcccttatacgggctggaatgtgcctccctgtgtgttgcgggtcaggtaggtttacccttcgttaaaatataagagcacccttagccacgagccacggctaggatgcaatgtgtaatacgtgctttcgcactaaacttctgtggtccctcagaaaggaagggtaccaggccaatcgaagcctcttacaggggcgccggggcgaagcctcggctagaagtcaaatacactgggggggggggtccttgcctcacacccagtcaaacgtacaactgtacacagaggtctctaataccgcccaacactcggccacctactcactcttggccttaccaggatgaacactcggtcaatgcaccttatgctcaccggcagacataccccgtgcagccgagtgtatccagaccctacgctaagcttagcgacttaccgtagacggacttgacccttgtgtggcttgggggaaaaattctgctctgtttaatggtttagaggctgtcaggcctcccctatagctaatccctaaggtctatacaaatatcaagtgtggaccgagctttcgagttgatcctacaaccggacgaaacttcgtcctaaatccgaactcctactgggcataaagtgtacccactatgaaacttcggagcctcggcaggcggtttattttgacccgccgagatcctcctgtcactccgtagtctctatcaatcttctgggcactaaagcacgaggaatgtgaccgaccaatcagagcccacggtcagccatctctcgcaagctcaaggcagttagacctcgaccggaactcgcccggccgcagtcatttcccgatctcacagagtgtcaagcccgcgtgatgccctccgcatcgtggctgttgcgggagatcgagaatgagcacgagctcagctataatctatttcaaaaccatcgcaagctatcggacctttaagttgcctgtctttctggcaagcagtgctattatcggataagttgcactttatacaaatgtttgtatcctctcttattagataattcctcgcgattccgagcaattccggaaataagctgggacacacttaacctacccctaatactctgtgattgggtataattcactgtagcccttgcgtacacgttgccgattgggccatgcccctgtagtctctgtatgaggggtgggatgtccggccaaaatactcttatcctacagtatgtagagcaaatttttagataatactgggatagcagtattaaccgaaatacacaagaaaacatataaagtacacacaaccagatggtatacaaagatgaaatcatttgattgaatctgattggctggtttgctcatgttaagctttgtttgacttcgtctgccggctttttgtgtctgtcggctttgtatggctgctggacagatgaacaccacccgctcaaagttaacgcagctggtacacgtaattggtagaatggtacatcgaaacttagccgaaagtgaacgatactcaagttgaagtgcaccctggataccggtattcatctcgtaggcgccgagaattcgcagatatattcacagagtgatctgtgtacttaagttgtgaaagagaagtgttcattcttcaaatagggctaaacaacgcaagcctgctgctacacgtatgacttttgatcccattatcctttcaatggggtaagtatccatctccagagagcgactggtgcgctgcaggtgtggcgcgccgaagtcgcttgcaatgcgggttagacaagtttagacgagctatcccagtccacgcgaagccctgctgtagtcatatgtaccggtacaatgtttgtccgtactacaaacatcaagagcaggtgtgttaggcgagacatgaatagctttaacccccccccgcactcgcgaggtttttcggtccctggctttgatcaatatacaccatgttaaagctgtatactacatgttaaagtatgcgtatttgatctaactattgccttccgtaagtacgacacatttctataacctgcgggaaactggttgacacagacagacgcacatgttgtctaagacaccctccgatgggtagctaaatttcaacagggtgtatatactacaacttgcagtgtcctttttattgatcgtgaacaaaaatcaaacacaagggcgggtctatgccggaagtatcctatgattgcatcccaacataccaggctatgcatgccttgaaaacaaaaaaaaacgcttacctagctagcaatcaagtgacacgtcttaccaaccgcgggctaatggcgtcttagcattattatagcgcacgtcctgctcggttttattggattgggccacctcaccaggctgcactctctctaaggggtgcatattagtacttacatgcgcaatataacccttacatagcaaaatatagtgtctacggtgttcattcttttcagcttacctcttcatatacataccctggtatatcggacgagattcatcttgcatttcgagccactatgcacaatcatgtatcatatcctgtctgatctgatcggagtacccagggcatagtaggggtagcactgtctcatacgcatgatggggagagcggttcctgttagcaatctgtaagcaatcaaataatcagtctaatccaccattctctgcaattactactcgttctttgtgcatattttcacctacatatgtgcatttgacgcagaaaaagacgtgctgttccttttcataacatgtagtcatatacaacgtatgagtgcggggggggttaagctttgctaagcgcggtttttgtcatgtagccttgcagcgggaagtcttggattccaagttggaaggtctttgtttcgtcgggatggatgagcccacgcaatcaagtttactctcttgtgagtgatctgcaaaagcttcccggaagcgaattcacagcgtaccgtagatacattaaactcccaaatacttgtcgcaatcttcctgctctgtgtgagcggaagatgtgatttggtagtacttaggcagaggaagtccttggttcttggtacacgcaaactgtatttgtcgtattacggtacttgttgatctgtgtaggtgcccgagattgcctcccgaggccacctatgtggttgatccacgtctgcttggtcggagcagaatttgacttttattccttggtttagattccggaatgagcccagcggccattcctgctgataacgttctgctagccgtactatcttaaacatgcatccctactcgcaacaactacactggtcactaagctaattctcgctctgttcttttggtcagtgactgactcttgctcgcgagctcctgcagaagctcgtgacattccgtccccgaagagaagtcctccgcgtgttcgttcttcgtggtagcgagtgatcaggtcgcccacgaacttcaaattggacagaggttcccacgtagtcttgcttgtcccggtccacttgacctcgtagtagtccttgcctttgatgcgcttgtgcccgacgatgtcgtcaactaactctccttcggtaccatctggcagctgcactttgaatggtttttgctctcgcgatgtgctgcgcacgtagagcttgagatagctggtgtgaaacacggggtggaatttgaccctttttggcagcttcaactcgtagtagtcatgcccgagccggctgaggattgcgtatggtccaatccaacgagcccccaatttcgctttcgttgtcccagcatgctaatttgcgaggttatcggttgacagcagtacttcctccccgacctcaaaagattgcacgggtctgttgtcgttgtaatagtcgctcatgcgtgctgcagctatctgcgcacggtagctagttggttgatccgcctgttgctcgaggaacgtcttccccagagcacggcgttgtcgttccgcccctgttgcacgaggtggcgctagcagacttgccggtgtcgacggcagataacccaaatcggcttcgaagggtgccataccaatcgactgctggtatctggagttgtaggcgaactctgccagggagaggtagcaatcccaatcggtcgacgcgccattagaaaatgcgcgcaaaaagctctcgatagtttggttgagacgctcagtaacaccgttcgcttggtgccgaaaagcgctcgtcaatttttgtagagtccccagcatgctgcatagagttgtccacacagtagcagtgaactttgggtctctgtccgacagaatctccattggaataccatgctgcacgaaaatgcggtcacggtacaattcagcaacttcacgcgctgtagcagtacctttacatgccacaaaatgcgcacgcttcgtgagctggtcaacgaccacgagcacagagtcgaatttgtcacgattcgctggaagtgacacaataaagtccatagccacgtggatccaacgcccttgagcgataggttggctctgcaacaatcctggcggcttcgtgttcctagctttggttcgttggcacgtctcgcaagacttcacataggcgcgaacactcctcaccatgtgccgccaatattagtgagcctccaccaatcggactgtccgatcgattccgggatgtccgtacacctcaacatcgtgaaactcgaacagaattgcgtttattaattcgtcaatagcaggtaccaccagccggggtgcttcatcggtcggcccgcagtacatcaactacttcccatcaagggaatagcgatcaacgaacttgagtttctccgtcgtagccagcgcatctcctttcaacgcgcgtacaatcatcgcagtgtgaggcatccatatatcgctcagtgacttcctcaaccagcgaaatcatgcccttcttaacccgcgagtgcacctcagaagccgcgataatggcattaagcgactgttgttcctgaaaatccgcgcgcctcgagatgctgtcggcgacagtattcgatgggccgagtatgtacttaaacgtgactggatactcgctcagttcatcgtaccagcgtgcgattcgtcgagatactctttcgcgaaaacacattttcgagcgacttgtggtcggtctccaccacaaacggcttgtcgagcaagtaaatgcgccacacgcgcagcccaaagaacattgcaagcagctctttctccctaatagagtagtttatctctgcacccttgtatttacgaccttgaaatgctagtgggcgctccacggtttggccatcgtgctcttccaactgataaacaacacatacaatcgcgaaatcactggcgtccattcgcataaagaacggcttgttgaagtcgccgatagcaagcaccggagtagacgaaattcgttgtttgagtttattgaagtgttgcacctatttgattatagtgggatagcagtattaaccgaaatacacaagaaaacatataaagtacacacaaccagatggtatacaaagatgaagtcatttgattgaatctgattggctggtttgctcatgttaagctttgtttgacttcgtctgccggctttttgtgtctgtcggctttgtatggctgctggacagatgaacaccacccgctcaaagttaacgcagctggtacacgtaattggtagaatggtacatcgaaacttagccgaaagtgaacgatactcaagttgaagtgcaccctggataccggtattcatctcgtaggcgccgagaattcgcagatatattcacagagtgatctgtgtacttaagttgtgaaagagaagtgttcatctccactttacaccgcctcgcgaggcattggggccaagttaaccgtgttacagattaggatatgtgctaccgcgctacaggccggccgaaggccgggctgcgcccccaatgtgcgtggtagctcaatccctctgcaacgcggtcgacgtcttggccccgctgacgatcttgctggcaatcccggcgaccgactcgctgcacagtcttgtgtagagcttgaaagcgtcggaagcccagcgaccgtggaattggatcgtgagagtgtcgactccggcgcggtacatgttggtggcgccgccggctctcagtgagtgcgtgccgaatcgtgtcgggtcttcgcccacggcgcgggccgcgtcgcggatggcactcgttacgcgcgatgcggtcacgcagtcgggccggccgtggcggttgatgaatacggctgccgggatgtccggtgggaggccgcgacgggcttgagtcaggagcaaggcaccgaggactgggcacaggtggcggtgcccggagcgcgtgagcatgcggaccgttggtgcgccattctggtttgtcttggagccgctgagttggatccgcactgcggacgccgactcggggtcttcggttgtggtgccgtcgatgtcgaccacggctatttcgccgcctttgagggcgaaccagcggaagctcgaggatgtgacagctatgatctcggaccgccggagtaagaagaagaaggacaggcacagaaccccccatagagcttggtccgcggggttgaggaggtcgagcgttgagaagcatgcctccagcattgcgatggacgcgggggacctctggccgctgaaggcgcaatcgacgatgaattctgaaatgtgccggagctgggtggtcaaggggagatcggggctccagacgacgccctggcgggcgctccatcgggaccagcgcttgaacgctcgcgcgtaggcgttgaaggaagagtcggcgatggagtgctcgcgcagatgttgtgcccggcggcttcgagggctgggatcccggctggctggacctggtaccagtcgcaggttagttcgtcaaacagtcgcgcgtacgattcggccagccagtaccgggaaccggcgtcggcggctgtgttctccaaccccgggatatgtgaggctgacagccggagtccgtactagtgctcccatagacagaggagccggatcaagagctgcgcccgttggttcttagacgacattttcgcctgccacgcgatcgcggatgtgttgtctgtccggaagtggatgtgcagtggacttgccttgggttgggatcgctgccacgctgggccccatgtctggacggcgaaggcgcatgctaggagctcgcggtagttgatgtcgaaatggttgttggccccgccgttgaacgcttggaccagggtctgctcttcgacggagaactggtaggtgagagccagtttagactttggaacgagggcgcagatcccggcatccgatgcgtctgtgataaccgtgatgtctggctctggtagcgaattgaaatattccagcggaactccgttcagcgctggcgagttgagaatgtaccgccaccacgtgaggtcatcgcgcattggactcgtgatcttgacacgagcgcatcggtgcagggctcgctcaccgaggcgaagccgttggagaaacgcctgggcggggtgcacgcaggttgcaacgtgtcgaagggagccgagcaaggagcgaaattcttggcgcgtgagtgtggcagcttgacaggcgtggccgatcatccgctgggccttcgcgattttcgttgtgggcatcgcgacagtggaggccttggtgtcaaagactaacccgagtactttttggcgggtgctccaatccgtgaatttcttgtcattgacggcggctgggcccatgaccgccgtcatcgcgaagcgtagtgaacgttcgacggttgcgcaccgtgactcgatgtcggacaccacgttgacatggtcgtcgacccagtggtagttgtagaagcccgtcggcaggtcgtcggtgctggtggatccgtggatgtaggcgacagctccacccaaaacgctgtaagtgccggcagaccctgtccagccgaaagctgcggccaagtcgaggatgatggcgttgtcttccggaaggtatcctgcgaacatgtagacactttcgctgtgggtgtgcgcgttgcggtatgcggatgcgacgtccccagccatgacgagtacatcgcgatcaggatcttcgagttggcagcgggtgatctcccgggccacactggagcagtgctcgaacgttgggtcgggcacatcgaccgtgtcggtgtgtgaattgaccgaggcgccgtcaggatgagagagatcgtgaattgtccggccggaggtacgcgggtcttcatcgcctttggcgacgacaccgaacgggctggtaaagatctctggccatatcttgatgatgtcggcgtccacgacgaggcagcgcatgaggtcctgctcccgtcggatgttggcccgcaggacgttgattcgagcggaggcggacggatggttgcgcggaaaccgcgactgacggagaagcggtttggtaagccggacgcgtactccttcggcggcgatcttcagtagtgcgtccaggtgcttgtaccctttgcagtggtgggcgaggacggccagaaccaaggccttgttggggcggtaatcggccgcggtttggccgcgcaccagctccacaaattcgggcagcgatggacggacgcggcgaatgtattctgacatcgccgccggcagcggtttgttcaggattggagggttcgtctcagctgcctgccgtggcggcaatttcaacccgacggcccggaacgtggatgcgagcgaggtatatcggatcgagtcccataggcgggcgcgcgcggcgccgttggcgtgtgcagcttgcagttcggcctcagatggagcttggcggagtctgaggaggggatggtgcgacgtcggcgcgctgccgtttccgtcgatgcgcgtgtgcggctccgttagtggagcagccccaccgatcacggcgggctgggcggctcggttcgcctccgcaggagggggttgggtcataatatcgcgctctgttgatgagtgcggctggttccgggcctggtggccgtgctcgtctcggcctacggaacaatcgacaacggcaagctgcgggacgtgtgtcctgcgggtcgcattggcgagcgtacgtggatgtggtgtcggccgattggccccttcgatggcatactgcgggtcgatggcccggcagctctcatcggcactggccaaggaaggctgtgacgcagaacacccctcggaggcatccagcgggctcgatgcccggttggtctcaccggcacgggcgtgggattgttgttgcgctgtcgcgtcgcctttggtggcaagcttccggagagcgacctggcggttcgcagtggcgagtgtatggggcgcgttagctgtcggcgtggcccttccgagcgcgtccggcgcgttgctggcatcgcttaggggctgaatgggcagccgaatgcgtcgctttcctggcggcgcgcgctcagctggtgcctggagcgtggcttgaacagggctatttgttggcgcgccggtcgcgttgacgaggctggaacctggagcgaggacatgcatacttgccgcaggaatggattcactactcagtaagttgaagccggatgtattggtattgttactgagctgactccggggcgccggtgaaccggcggcgcctcggcaccttcatgaccggcgcgcgcgagggatcctgcggccgccgaaccgctgcgtgatgaaggcagtgagagcatcaggtaacgcggacggccacacgtgggtgcggcccggggcggtgcatgtggagcgtgatccgccggcgcacatgccgccgccgaagaacttcaagcagggctcgatctcgtcggcgtcgcgggggatcaatcggcgaatatgctcggggatgccagccggtcgctccgacatggcgcgcgggcgagcaggagccggggccgacggcggtcgagcgttgcgggcgtgcatgggggcagcgtgtcgagcgggagcttgagccagttcggccagcgccaaggaccaggcgactgagctgaacccgatttgtgcggcggtcgtggaaaattcccgccaccagtacggcgagtcggacgccagcggggcgaaggcgtcgcccaggaaccggtcgacttcgtccagtgtgcgctcgacacggtccgcggagtgtgcagggtccgcatccatgttggctgtcacaaactcgcggacccggtacatgacgcgggccatgggctcgtgccagtgtgcgttcgcgaacgacgtcagaccttgcacggcgctgaggagatcaaagtacgacgtgcagctggggacggcgcgcggggaaatgttgctactgaagtccatgttgaagttggcgtcggttgacccggcgcgcaggcgcgcggtccggtcgacacgcttgcagtgcatgatcgatagtccgtgccggcagaacctagcgctgtacgcctctatggcgatggccggggcactgttgaatgtgaactcttggcgcacgcgcagtacgtagctcatgggggttcatgggctccctccggcgatgtgaggtacgggatcaaccgatgtgcagccgggtcgtgtgtatgaaatccccgcagacccgctggggtggcggctggaagtgagcggctcaaaggttgcgcgtcgccggcggcgggagcgcccctctcacgttcggcagtgtccacgacaaggagtccgcggcgtactcgggcggggccatggtcggcgctgcccgcgcgggtgcggctgcgtggacgccggtcgcatggtggtgctggcctcgcaggaaaaccagcagctcggaaagcacctcagccaaggcggggtttgatggtggaggctcgtgcgttaactgggctatctgaggctcgaagttggcctggtgtgctgtccctgatggcggagggcttgccgctggtgccgccgctggggctgcctgtggccccttatggaaccggccgaggaaagtgggcaagtcgaagggctcccgtgcgagggccgggtcccgcacggaccgcgacctgccgctggcagtgggcgccgccggtagtgggaggcggtctggagttcttgcgtcgtccgtcgagggtggcgccgctgacggagcagggagcagcgacgcggacatggatcgcgggatcactgggtggccggggtccgcgtcggagtcgctgtccgagtccaccgagaggatcactggagctgccgccgccaggtgctcggtcgcgggctgcgcaggtggcgtcatggacacgggtgtcgcacttgcaagcgctgtgtgggcggctgccgccggcggcgccgacacatacaccgcggccgttgccgcgggcttcttcttcgccagccgcttgggggtcgatgctgtcttcgccttcaccttcctcatcgacttcttcggggccgccggggcgctgcttgatggcgccgctggcaccgctgccgacggcccatccgacattgctggcgctcggggtgagggccgtgtcgaacgtggcgtcgctggagcgcccgcgggaggagctgtggccgtgcccgccgaattgccgggcgaagcaggagtcgacgggtccgatgaggtggctggttgcggcgccgtcgccgggtctgctgcagcctgtcctgccgaggatgccgccgccaaggaagccggggctgccgttgtcgccgctgggcctgccgccgttgctgccgctgggtccgtggagctcgccaccgtcgtcgtcgccgctgccgtgaccggtgtcgggatggccgccgctgccggaggggggctcccttcttgccgtaggatcagccgcttcttctgacggcggatgtcaagggcgtccgcatgggggcgtcgcttggtggcgatcctggtgctggcccgcggtggggagagctggcgccgccgtcgatgcgtcgtcggtggcgtggggccgtgagcgaagccggggcggtagtaccgacagcgggtgccgggctggacgagagcggtggtggcgcattggatggcgtgtcgggcgcggacgggggcgggggcgaggaagaggacgacatcgcgggggttggactcctgggctgcttgcgcttctgctcgctcgggcggaggacgcggaatgggggcctgctggccgcgcccctgtgctgccgggggggttcgtcgccctgtgccagcgccttgctgcggacgccttgcgccagcgccttgtccgcgcggctccaaacgtggaaagctccgtttcactcgaaacgccgattcttcaaacagggctaaacaacgcaagcctgctgctacacgtatgacctttgatcccactatcctttcaatggggtaagtatccatgtccagagagcaactggtgcgccgcaggtgcggcgcgccgaagtcgcttgcaatgcgggttagacaagtttacacgagctatcccagcccacgcgaagccctgctgtagtcatatgtaccggtacaatgtttgtccgtactacaaacatcaagagcaggtgtgttaggcgagacatgaatagctttaagctttgctaagcgcggtttttgtcatgttgccttgcagcggaaagtcttggattccaagttggaaggtcattgtttcgtcgggatggatgagcccacgcaatcaaatttactctcttgtgagtgatctgcaaaagcttcctttggcttcctcgggtaccgagagtactgtgcagcacggcaagctcccccgatcccggactcactgaagaggagagtggccctcacggcggggtcttgcacggccaagcatgaagacacattgaaacatctttggagggtttcagctaccgttcgcagcacaacgcaatggatgcagcgcaacaggctcatctttgaaggagaaccaacatcggtagagcaaagttgcgtcgagttccgggtgacgggagttcgtcagttgaaggcaatagcaaggagggacaagatgagtccacaaacggttgaacaaggcatgttgatggaggactgtatcgacagttttctattaatccttgaacaaccaggacaagtacgggttagcagcatgcagaatcgccattagtgatgatgatgaaatcttctttaggattttaatggctatcatagtagtccaaatataatctcttctactactacatctgcaaaagcttcccggaagcggattcacagcgtaccgtagatacattgaactcccaaatactggctgtgtagcgctttcgcagtccctctcctttgacagcaattttcggcatcggggagaactacacacgcgcatttatctccactacacattgttatcatgccgttttgaagcagggtacggaacccacggaggagtagcttttagcgagtgacagcgtggatttagcgaagccacgccgtgtacagttcgtacgtttaatgtgttagtgttgagattactatggacgggggcgagcgaatgcgagcgcgaggctcactaactgcattcaccggccgccggttaggcgggggcgtgtctgcgcgagcgagcgaacgcgagcgctgcaacccgatatttttttccagacaccgcgcctggccgagacgaggatttagcgtaagacacaaatgggtggggcagcgcagcagcgctccccgagcgaagcgagagaggggcggccccccccgaagtgtttcgctaaattgtctggttctggattattctgtaaaaaaacaaggttaaataaaaaatgactggttctgccaaatcgcgatacttacatttatttcgaatatgtttttttattgaacgtgtttgtattcaccttgtttagcagggatggtggaggatattaggtagcttagtcttttgagtgcgttatatctctgtaaattgttcttcaggggtcttataggatccaccacctcgattctttgaagtttcgctcggtatcgacaaccaatgcctgaattaatgctgtatatatgcaatacagcagtgccgttggtacatgtatgtaccattaaatgcctgggctcgtcccttgaatgccagaacaatgtgatagacatcggcaaatcccaatagaccagaaaagagcgagcaggtgtgtaagcagcattgggataaaacgcgcttcaacgcgccagttacgaagctcacaatgcgaattcacttgcaatctgcgtgcagaagcaacattaggattcataagaatggaacctgtattgctactaactgtttcttgtaactctgctgccttagggtagtgtggtactgctaatacttgcggcgacaataagcaaataaaacattccatgcacaaaagaaatgcacacagcacagtgcagcgcgtacgctaacgatatatattccaattgtatatatctgtcttaaaaccaagctactgttgacgacggtgcagcccaatggaagaccggagagatgatggcctgggcaaacactcgttccgcatcctccagactacccagcaaacgcagcatcggtgtcagcaggtctgactgcgctatcacactagacaagaggctgcgatttgggtcccactcgaagtgggtggatccgcgcataacaatccggcaccccaatagtttgcttaccagcgcggagccagtctcactctcgcggtcgttccagatacctgggaacacgttgcgcagcgtgcgttcagtgacggtgaagctggttttcgtgatggcgaccagagagtccgcgcctcttttgtgcaggtcttcaagctcgaggcgaaagtcttggaaccagaatgaagcgcgtctccaactgtagatcgccacatcgacgcctcgtccctcattaagaatggcatcttgagccagtcttgagcgtaagaacgacagttgagcggaagagagatctcttgcgtggacgggaccggacgacgcgggctgctctcggagaccgagctggaacagtcggaagtactcgacagctacgctccagacgcaggcgtctcctcctgggacgacaggggtaacaatacgtcgctgctgtccgagctgcttgatctgtagctgcagtttactggtctcctgctcgagggcaaccatgtggtcatgctgcttctggcggtatcgacgctggttctgacgacgtgcttcgcgaagactttcctgccccaacgcgataagactcgcgacgtttacgcttacgctttgcttgtttgagttttggacagttgttgccgccgtgttggtagccaccggttcgcggaacggagacttgcgacgcgtgaccggctcgaccgggagctggtagttgctgtgacgggtagtacctttgaatgggtcattcacaggcctctgtgactgaacgccttccgctaggcgatgcttcttccacgcgggagtgtagaaccccttggactcggctgggcgcggccccaaaggggcgatgctgaacctggagagatcgggggccgccctcgtgcgctgcaccacgttcccgatcacgtcgtcgctccggcaccagtcgttcggagggtggaggaccgaggcgttcattgtgtcgagcgtcgcgtgctgattgactctctcttgatggaaggaatgcaggaatgaggaattcaggagactcggtgcttgtaggctgccgctgtgtcacgattaccgatttgacggatccagccccaacagtcatcatccccccacagctgggagatgaggcgccgatttgtcagcccgtaaagtagtggcgcagcgtcgaaggggatcagggtctccttcgggaattccccttagtagtgatacatacaactcatacatgtactttgtttacatcatttccttgcttttgcgagaacgcagccatcattgatgacaataaatggcactgaagcgtgttcgttgtaagagcctgtcgaagttggcggcgtgcttctgcatttgctgctactgtaaggaagagcgacaagttcaagacggaccgcagatagtggcgattctacgctgctaaacgaaatggtatacacaatgcgtagacttgaaagtgtttcgggaaatacaacctattttaataatattatatatacgtagataatactaggtacagtattaaaatactgagttggggtttaaagccacaacaggaaaatcgtgtgtttatctttggactcggttgttctagttttaacgaattcgctattgataaccaagagttgatacctctctacagtgatatacagactagagcgtgagaacgagacgggtaacaactaatacccgtttttaccgatgagatcaggtattagattcaatgtaaaatacataaagtggtgtctgccacatatgatttccttttaaatccggatatatcaggcgtctcgttctcacgctctagtctgtatagtgtatgcccatttgaagtaggtatggccagtctgttgtcctgggatccctgggagagggatcactggatctcttccacatgtaattcgcaattggattgagcttcatgtatcagacgctttagtataaccatctttattcttccaaacacgatcacccaaggcttgcttgaacaccactagctccgatagtctatgaacaagcccacatatataggaactctggtggcgttcctatatctcgctcgtatgtagcacgtcttgtaactcgagtcattagcgcgctgaaaaactgcggatggcagcgtaccgggaagtggctcgctatatgcactgttgtttgccctttggcgagtaaagaacgcgggtgcatgtgcactttccttttgcagtgcatgtatgtacatgtacgtgtaacccgtgggttactctgtactggaacaagcatacataattcaaacgaatcatgagtaaggcaggcagagcaggtacagctgctccttggtacggattccgtgcaagttgcagcaaagcaaagcccaaaccagatcttgaacaaaaggttcggtcgttccaaccgtgcctgccgccacttgtggaatcgttcttgctgaattgccagggtgctctagttgagacacttatgcctatttgccacaatccggagttttgagacgcattacttctcgaaatttgactacgcttttttctatcgaaaactgcttcaagtccaaatgtatccatctagagttttgaggcacccatcagaaccttgaatgaggcactacgtgttttttctgcacacattgccacatctagagcaccctgtgaattgctacttatattgtgggttctactcaaaattggagtggtcgattggttcaatcaaccgcccccggtactatgctaggtgctgaatccgtacttatacggaatgataaggtatttcggcgtttcataggcgttttttggtgggagtcgattccaaatttggccggaattcacaatacctaatatgtgaaaaccgcttaatgtgcctattttgctcgtaaatcgattgattagcactattatttattgtgcctttcacttattctgccgtgataattctggcataaccctaatcccttctcggctctaattattgctttaggccttgtggttgctttaatttctgtcgtgttgtcgtcatatggttgctgtaacgccattcgtctacctctctagcctagagaggcagactgtgtcctaactgtaggtgacagtaacttactgttagaagcacgcaacaccaactgttagagtgtaacgactaccgtaagcgcgaaagcgatgagagagatatcccattgaattagaatcgataaagagacgtaaattagagtggagttaccaacgagtgtagtgcatcacgatcaagctccgaaccccctcacattgccgacttcaaccgaaagtccggggtaatgcgcgctccttcaaacacccgcgatacatcctccagactcccaaccagacgcagcatcggcgtcagcatatccgactgactcatcacgctcgtaacgcagcagtacgcgccgtcccactcgaaccgagtggagccgcgcatcgtgatcgtctggccctcaagtcgctccgacaagaacgacgctgcactaccaacctgtccaacgccagtgctcagatgaggaaacacgatgctcagcgtttgttccgtgatagtgacggtgaaggtcgtggtggccaccagagaccccgttgcgtccttctccaaacgctccagatccatctcaacccctgcgaaccatcgcgagacgcagctccaagtcctcagcatgacctcagcacctcgctcaccgttgaacgccacgtccgccgtcatcgacgctcttaagaagttcaactgagcgctgggctgcgcctccgaagacgacgatgatactgatactgaggcctcactgacgccgtaacggaagagtcggaagtactctgcggccacacgccacgcgctctctatggcggggacggctgcggacaccgagcgtcggcgctgctcgagctgctcgatctcgtctcggagctgccgcgtctcgtcctccagactgtgcatgtagttctccttcttcttgcggtaccggatctgcctctcgcgccggagttcgcgcagccgcagcttctctgcggtcgccagctccgccatggccacgagttggtcttgacgcgtcgtgggctctgctgctcggttgttatgctgggctccgctgtcgtcccgtaagactgtgtgcggagtagggagacctttcggtagctgcagttttggctcaccagtcgataacattgtgtccccttgctgcgtcctccactgtctcacgggtaagttcgttgaaggtgttcccgtctctccttcttggtgacgtgttcggaacgcgccgtggccttcgtgtggatggtattcttcacatacatgagagctgcggtatctcgaggcggcggtggagcgctcgacaactccgccgatgacattgtcgctgaagagctggctgttgggtgggcggaggacacagccttccatagtcactgtcgagcgcgcgcgcggtgggggcgctgacggggaagagctgcttgttggagaatagtgcatcgttggtctacaagtagtttgtccgtccgtggatgaagccgtcagtgaaggtgatggcttgttggcggcaggatttgtgggtgtgttctgtgacgtgaagtcttcttatcagctggctccacgacccgataacgcgtcaccgattgcgctgaggcttgtctgtaacttcgggggcaaatcctcgaggtgagatgccgcaacagctcccagtccagctgtaggggctgccgaaaagtgcagagtctgcactgttgctgcgttcatgttcacgagcgcaagtcccaggcgtggatagcccggtgttgtcactgacaacacccgctcattgtgacacaggggggctattgccaacttgtcagtacagtgtcgacatcgttgcacacaacctgtgatgaacaggtactttatgtactgtagccccgtgagaagaaggatgtcgtctacccttagtcgaaaagggccctcgtggctgcatcgcatctgcaacatgagctcgtactgtactgcactggtgctgtactatagtctagacagtactgcccgcttgcctgtacgtatcaaggcaattacaatgtactcagattcgtccaaagggtctatattcaacgactcgcgttacagcacctttaatgcaaccgcacaacatcttcctaaagcgcctttaagctctacggcgccaataagccaaaaagagggggtgctgcagtgtactggagcagacccccgcaacttgaaaactagcaccgagttgcggcaacgggtccatccgctggaatgcctggtggaggacccacctccgcaaaatcgcgcagacctgctttacaagcactccgtgcaggtttgcttgctatggcaacgtgtcctcacaacagctcacaacgcgaacagatgagcccatgacacccgtcccgcttctatccgtcactacaaatcccttattattctgatctgtgtaaagatttgcttctgtacacagactgtgcacagattgctagggcgcccttaactaccattaaagtgtaggagggatgacctccaggcctgatggccttggaaatgggcaccccgaaggagtccctgaggaggcgggggtccggctaagtgcctacttacactccgccgatgcaagctagtgcgttcgatagctctaacatacctctatgaagtaggcagtaccaaaagtttgtccaggtgcaggcttacgtgctgcgtggagtcaaagttagcacccgttggaaagtgcgaagccacaagtgcatttggtccaagcagcctcaaattccacacagcgctacaaattaacatttcacgtatattctgctgctgtgtgtttcttgacatatatattgaggatgaataatgctaacgcggcggtataagcactctactgtagaaggaacctatacgtagagatcggcgtaaaaatggctatttggttatgattctctggcggatggttgttggtgtaaaggttcatttgaaccaaaaacacgaagccctggctttgctgaaatagtgttttagtactttgacgtttcaggagcgacccactgacagaattgcagctgcacagccacaattgcactttcaaaagtgcaattgtggcgcttttagcgtaattctaggcctccacccatttatgcacctcgatttatcgtaaatctagcaggtggtcgatataaatacagcaaatctcgcctcatattgccaaaatcattgcaaagcacaatacatgtacagtataatcaaaggtaatctttgtatctggaggtgatggttgcaccatcggatagtcgttgccaacttggatgccgcctgtgccaccagatcactcaaagcggcaataatgggcaggattgcgttggtggctccatcgactcgatggcatcgagtaaactgggggcttcaaatctgagagtcatgaatctcgctgcggcaacggcaaagcttagaatggatcctgctgttttactcacgacactacgatacgtagttgcccaggttgcagagttagttcacaccacaccttctaataccgtagaatctacgagcccgagcccgtctacttcaaaagtgggctccccctaaaacgagagccaaaagtcacacaaaatgggctccctcatggtaagtacgagatcaaggagccctggttcgggctccccattggctcctccccaaatttagctttatacctatgacgggctcttcatagcaatatctgattggccaattttacctagacttaaggcgagcaacttcgcgtgatcgatgcgccacgctagaagatcgagctcaaagatcgccacactaaaagatctcgcgccgctcatatgtgtacagccgctccgaggccaccccagcgtcgccgatcgtccttccttcccctcaaggagaagccctctttcctatgccttttcaggttagaacctggagatacttcaatgacggccaatcatcagcgagatatttaacacaggtaaggggggagcccttaacgagggctcacagttctggagggctcctttcacttaacctattgaactcaagagcccaggagcccgagctcgcgactttttgggttcacccaagagcccaggagcccggctctccccagggcccgtagaaggtgtggttcacaccatggagcagtaagattcatgtacagcgtaaaactttgctctgtgtgcgcgctccttggaagagagagagagactgcaacaatgaaaggcggatagatacactgccaggtgcaagttgctgtcgaaccttgtcgacgcttgtgctcatgcgctacaactacatgtgtgtacatgtactgtaccacgtattggacagcttatcgaagcacctaacctgtatgatacagcttatcatagtcaagtctttcacaacctgtacagtggagccaggatatcgctaatgcaataaatacaatgtacttaaagtgctgtaccattactatagatgctacaacctatcacctccttcacttgctcgcgcgcatttgtcctcggtacggggtgagagagatcagagacttctcgaacacgcgggagacgtcctccaagctgccgaggatgcggagcgtgggcgtcagcatgtccgactcgctaatgacactggtaacccgaccgtaaccggcgtcccagtcgaagcgcgtcaagccgcgcatggtaatgcgctgccccaggagcttcttggccagcgggagtccgtctcgtcctctttgactgcgagcttcgggcgtgcaaaggtgcggaaataccgtcataagcgagcgctccgtaatagtgaagctcgtggtgatagaggcgatgagtgagtccgggcctcccttcttcaagccgttgagttcgatctctacgtcgaggaaccacagcgtaaagtacttccagttcctcatgatggactcgacgcctcgccccgcgttgaagagcacgtcgggggccatggtggcgcgcaggaaatccagttgagcacatggttggatctcctgagtctgtcgagccggcatcggctcgcggagcccgtagcggaatagtcggaagtactcgaccaccacgttccagagcgtcttctctgtgggcaccgcctcggcgatggaacgacggcgttgttcgagcttctcgatctgctgctggagctggcgcgtctcctcctcaagggtgttggcgtagtcgtccttcttcttcctgtaccggatctgtcggagccgacggatctcgcgctggtgatccctctgggaattggcccactcgatcatggccgccttctgctgctcgccccccttgaactgaggctccggctttgagtacagggcggctccgctgctggagacagcaagcagcatgagcttgttggacgcgggaagcgacgtgggctcctggcgcttcctcttcctatcggtcggggagaactggccgtctactgccgctgcggtggtgccctcgggcgacacgcagcgtctatcccaggccgcggtcgtcgtcgcgtacgcggcgttgttgcgctcggtgcgctgcaccacgccgccgatgacgttgtcccgcaggacgcgggtcgcgggcgggcggaggacgcacgagttcctttgcatggttcgcgtcggtctcacgcaaatgagtgagtgtgtggcttgacttgtcctgcgggtgctgctattcgcggaatgaggagcgagcgtgcgcagtgattgcagacgagtggatggtgctgggacacgaacgtcgacccatccggaaggcggcgcagcagatggggaaaacgtcaaaagatgtatgaatttgaaacgttttgtcaaaagcggttaactcgtgtcattaggtgtatgctaggttgtcggtatgacagtatgtgtatgtggttccaagcgcactaaggtgcatgataaagctgcatcagcaacgaatgcggtgactggcgtgtgcttagatccaaatccataaaacccggggttaggggggaaggcttctacctgatgcaactagcccggttcgtggtgtccatgactttgatagcgaattgtacggctgagggactacaatgaacgtcgttatccattgtagccaggcctcagcgttgccacagttctacaataccaccactctcccccggttgggggctctcactagagctccttcacctccgaaatttagatgcaaaacctacctagtatagccatgctatatacgcttgcggtttgcgttggtagttcatcgtagctacaatagcgaagttgtcgagtacagttgaccgtgttcgctacgagcgtgtcgttaataaactactgtgcttggaagctcgatcctgggtctgtatgacccgacctcggccgaaataccgcggcaaccaaaacgtgtgccagtacgtgtatgatgagacatgacgcgacgtgacgcccacgaccactacacctattaacaaacgttttcccaacgcatacgccttttgacgttttccccagcagatgacttgaggggtttcccaagcgattgggagcgcgaagactatttggcggaattgcagcgttccgagtacactgtacagcacaccttctacgagaccgagcccgtctacttcaaaagtgggctccccctaaaacgagagccaaaagtcgcacaaaatgggctccctcatggtaagtacgagatcaaggagccctggttcgggctccccattggctcccctccagggctccccaaatttagctttatacctatgacgggctccccattggctcccctccagggctccccaaatttagctttatacctatgacgggctcttcatagtaatatctgattggccaattttacctagacttaaggcgagcaacttcgcgtgatcgatgcgccacgctagaagatcgagctcaaagatcgccacactaaaagatctcgcgccgctcatatgtgtacagccgctccgaggccaccccagcgtcgccgatcgtccttccttcccctcaaggagaagccctctttcctatgccttttcaggttagaacctggagatacttcaatgacggccaatcatcagcgagatatttaacacaggtaaggggggagcccttaacgagggctcacagttctggagggctcctttcacttaacctattgaactcaagagcccaggagcccgagctcgcgactttttgggttcacccaagagcccaggagcccggcgctcgtagaaggtgtgccctagactagaccatcctcaaagctccagctctcctgtcgcgtggctgatgagcatgctaaggactcggatgggcacggctcggcggctgcattcggtgcgagctcgcgttctatgcaagcattacgaagcccgattcgcctcgtcatcattgcttgcagtgcagcagctggcgtcgtctatcgcgttgattgcgtccgtggggccgtgcgcgtcgtgcggcacttgaggttagaggagcacctcttctctcactttacaacgccatcgacttagtccaagtgactcagcgtgaccttcacactgaccgacatgaatagctgcgtactccggccgcacaacagccagcgactgagtgacgatgtcattggagtcgtgtcacgcgcacgtcaagccgaacgttactccgtcgccgacctaaacgcaaacacaaacgctaacgctaatgctaacccaatgcagtcgagctacactcctcaaaccattctaccgtcaacgtctgggctaatctcaccaatggatagaaagagggtgagggacgaacccacgatgcctgcggagacgcagctgaagcgcagacactacaagcagcacgaagatgtgattaaggacgtcatctcggagcaggaccgactgcgagagctgcgccgactgcggcagatccgctaccggaagaagaaagcggagtatgccaacaccctcgacgcggagaacaagcagctccaagaagagatcgacacgctcgagcaacgtcgtcgcagctttgcggccgccgtccccgctaaagagaacgtctggagcgtggcggccgagtacttccgcctcttccgctacgggttccaaaccgcggcggcgtcatcgacttcgacgcagccatcgatgcagcaggacttcctgagaaactgtatgacggcggatgtcgtgttcaacgctgggcgcggcccggaggcgatggccaagagctggaagtgtctgtcattgtggttccaagccgtcgagttcgagctcgaaggcttgcagaagggggtcgacgggtcgctcgaggccgccacgataaccagtgtcactatcaccgaccgcacccttcgcaacgtattcccccatctgcccagcgacagcgcactcagagcgaagttgctcgaccagcgccttgtgatgcgcggctcgatgcgcttcgagtgggatcccgctttcggtcgcgtgtgttgcttagtggctcagtccaacatgctagcgccgatgctgcgtctgttagggggctgggatgatgtctcgaaagtgtttgagagggccctgatctctcccgacttccagtggagggcaaatgcatgaaaaccgttggaagactaaatgactaatacttaagtaactggaagattattttcatgtccgtattccgacatgacaaagatttcgatctggccctccccaatagaccactggctgaaaacgtgaagtattcgcgagttattactgtggaactttgatatcagtgctatttcctggacaattctggctgttgtgaacacttgagttatggcaatatttcgacataattattctaaacagtgacattttcgactctaactcagtcaccttcagtgcaactgacgtgcatcagcacatgccagaaaaacggaataaatatgaactatttcgcaaaatctccggctgaacttagtgatacgcatcctataatacaatagttcgctaaatgttagtgcggtcactcgaaattattcaagccttgggcccagtcggcatgttctagtcgtttgtgttgaattcgttatcatgaaaaacctggggtttgatagcgtcgcgcatgctgtcgacctccagaagaagtattgtgcctttcggtcattttgccgagtcctacgtaggactttggaggtcagttaatctgaggttggtggtctctaaatctgagatgcaaatctcggacgagttcgatgagtggtctcctggagtctctgcgttcaatggactccggttggagtccaagtcaagcaatctttgtttggggaagcatgcaatgccggaacccgcgaaggcgaatggcgacgactggagtgtttaacgtatcgactgcatcgtgttttcataggtttattctgcgtttgacatacaccgtattagagtcagctcgtatgaaagtcctgccacaagacttggtaggagtccttcgtaagacctcaaaccccggatgccgtgaaaatgggcgacattcgggctttcggctgtttgtaggatctgcgcaagtgcttccatcggactagcaattcttggtcctaattccctgctaatctgctccgataacctagccccatcttagtaggcagctgttttacacaataaatggtcacacaactgatggacaaatcctttcaattatatatgtttaggaggctggatgtgttttcacaatccttacaagcctacggcatgaggcggagctgtgatttgttccgagacagatatttattcgaatagactcttgtagtgtgccctacatccactattttagataatacacaaatctatagaaaatttacctgaacttggtttaaagtagaacttttgcaagactgagcatcatccgctaagacagactttttgcgactgttaactaatgcaataatcaagatagtcccggtgcatcaaatcgtacatatgcaaacaggataagcgacgtcaattgtagcgacgtaacaacgatgtagcatgacagtgtgaacagcgctaactgcgagcttggttgctgcatgcacaaggtttcgacgccaagcaaaccccacaaggttgtttgagtaggtggcaggcaaggtgcggccaatggacccgttagctcatgtgtttatctgggtaccggtcaacatacagcgccttcaggctcagcttcagcagaaaagtgggtcatccctcccacaataatttagaccatagaaaaagctaaccctaataactctctaaactcacgcgcagtctctcttatagttttcgttatacttataagcacacgaagacgatctaccgatgcactgcagcgctccgccattatgctggccacagtacttcgatgtacttcttcctacgaagtactactacgtagtatctgagtagttaaagttactagcaatattcgccaaagctttgtcaaaaccccgcttgccttttcacaggttcgtgtgattttaagcttgaaaccttaaaaggtttcaagtcgcggtaccgtacagtagagcttgaacaacttcacttggtccttcttgttgaggttcagcaggtccctgacccacttgtattggttggtgcgaattctcaacgagttcgcgaatgcagcgtactactaattggcgaattcttctagtttatagtttcccccgaacggtggcatccttcagcagctcctttactgtactcgtagccatcttttccgtgaacccccctctcttctccatgccaccatcgctgtccacgttgctggtctcggcggtactcagaagccgttctgttcacgacgtctccaacggcctcgatgcggcccacaacggccccctgatgtcccaagttgggactcccaacgcatttgaaaccgaggcaacgtcttagcttgcagccactgaggccacggcaacgaagacgacgcagagtagacgcattgctgctcgcagtttgagttagaacgaggctggtcttgaaacgtgcgtgcttggacagaaaattgaaagtgagaatgaatcacgtgaataaagtagacacatgctaacagttcaacgtatccaatagtagggcgcacacagaggaaagcctggggggaaactcgtcatcatttcgtctccatattcaactgttgcagttgcaagtgttatcagctcgaccggctttgattgtggatgtcacgagcttctgcaggagctcgtgagcatattgatgagcctgtcactgttcagaggaaccctgccggaatttactaaagtaccagtgtagccgttgagcgtagtgggtgcatgttaagataggctagcagaagatagttaggaggaatgaccgctgggcattccggaatctgaaaagaaggaataaagtcgacttctgctccggccaagcagacgtgggcaaaccacaccggtgacctcgggaggggatctcgggcacctcgacagctctacaagtaccgtaactctacaaatgcagatttcgtgtatcaagagcctcaacaaacagcttcctttgcctaagtgctaccaactctcatcttccggctcgcacgtgagcaggaagattgcgacagtggaggcactttgcttacggggcacgattatgaagatgctggattacggggctgatgatgcaggcagcaagattacggggcacactgaggtgaatggctgtggcttcgtgcactaggagagagctagtgttgtgtacatgcatgtagctagggctgacttgctttcgaggttttaactttctctccttaataaactttcgctctagaagacaacaactatccggatctgcgcgatatcaactggcttttcatagtaagtacgagtaattcgtaatactgtgttattgcatgtatatatgtcactgtaggttgtaattgtgccttcccagtttgtatatgaagacacttgatgacaagcctaccggctttccgaatgagccctactgtaccactgttcgattgtgtctactttctcacttgcaattttcttcccaagcgcgcgcaagttccaagctgtagccagtccttctcgttctcactccaacctacaagcagcaatgcgtctaatctacgccgtcctcgttgttgtggcctcacttgctgctgcgacgttgccttggcgtcaaccgcgtcggaccgcaaggtgatcgtcccgggccacatcgaggctgatggagacgcagtggacggcctgaacaatcggcttctgcgagccactgagaccaacgacgtggcggctggcggtggcatcgaagagaggagactcacggaaaagatgagttcaagcacaatcaagaagctgctcaatgacgccacctttctggagaagactttcaggaactggaagtttgagtcggctatccggtcacgctgaagcatttcgaggatgccctagatgtgagtactcacaaaaaccaatggatccgtgcattgcgtccctaagttactctttagacgtaaacccgcgagtctttgaacattcgtgcaacactcgcaacatctccaaccaggcccagcatcggcgtcaataggtcggatcgactaacgacgctcgtcacgcggctgaccacagcatcccacacgaagcgcaccgaggtgtccatcgagactcgctggttcaaaattctgtcggcaacctgtgatcgttcttcgttcagacaagggaacaacgcgtcgattgttcgttccgtgatggtgaagctggtggttgcggtgcctaccaccgagttgtccgtgtccttcttgaggccttgaagctccacctcgacgtcctcaaagccgcccgagaaatgcgcccaactcgctaccagagcttccgctccataccccgagttactcaacacatcaggcgacataccagagcgaacgaactccagctgaacctctcttgttgcagaatagaccgcaccgtagcggaacactcggaaatactcggacgccaccgtccacagcgtctctttcggtcggacagcggccaacaacgtgcgaagccgttcctcgagcttgctcacctccagttggaaccccgggttgtggcgctcgaggtgctccatcaattcggtctgtttctgccggtacctgcgatggcgctcgcgacgaagtctgcgctggttgtccctctcctcgatcacgagtttcgcccagtcggcgtccgctagtcgctcgtctcgagtgggttcgtccacggctcggctttgagttgcgccagacttgaagcgcctcgatctcgacagaggcgatggctgcctcactctcttgtttcttgtcgttgatgcttcgtcgtaggccggattcggttccttgtgagctgtcatactgcggtattcgcgtgagtcgaaggtctgcgactggagctggggctggtacaagtgggcattgttgtacacggtctttgagcgtggaatcacgccgccgatcacttcgtcgctcagatactggcggttcggtggtcgggtactggaggtctgcattgtgtggctcgctgagtgtgatgctggggcgatggatcgagaaatgaggagtgatactcagaagtgggagcttgaatcataggaagtctacacctacaagcgtcacgtatactaaagcactcagcatatgctcagccgcttcttcggtatcacagtatgtgtgacgctaagaatacgaagagaacagtcgctttgtttgtagtgaacaggagctgcacctgtctatggaaatgcaatcattgttcacttgacggtccactcaatctcacagttgcagtgaacgagatgtacatgtaatgcatgttgtgacgctggagtgattcgctcgtagtcagaagcgtcacgcgcgttcgttaggactcgtgacataagcttaactctttaattttaaccgtctgttatgcctatcaaaatgcgtgggctgcttgccgccactatcccgttgcgcgattcagtgaagtacaggactgtaatgtaatgtattacgttttcgcgtggccaaaccatgctgtcgaaaaatctgtctatcgagctggcggcgcggagctgtcgggccgtgtcggtcacggcggtgtgactggaggtcgactcgtgtcggacgaggtgcttgcgctcggcgacgtaggacgcggaatgagccgcgaggttgctcttggtgcttgactgtcttatccgacagcggttcatgtcggctgacggcatgtcgggtttcgtcgtgccttccttcatccggaaaaataattatccacttgttcacttcgttgcaccgtggactaatttcacatttcctcggtgcttccaggcattgggggattaaagatttttcattgtgttaatgggccaaagccagaggcgctttggttgatagcaggcatcccgaaaaataatattgttatatatatatattcggatacaatactttatttagggcatcgccgtttgttttatccgaaatttatgtagccgagttctaaaattcggtattttacttctgctcatcctgctccaaccattagttgtggtcaaacatcgcgctctaccagcgtaactttgccgttagccctcactttcaaacaagcaccacccagcacgcgcatcacgactcgacgttagcaccatgatcgacaatctcctcgctggccccgctccgaggcctaccttcgcgcccaggcagattgctgccttctacttcaagccctgcctggacgaggagggagagacgacgggctactatgcctgcaagacctgcgctaggcgccgcaagcacgcgcccaagtcaggctacagcaacttggtgtcgcacgtgcgggcggcgcaccccaactacgagagcgacatgcgcgacgctagtgtcgctgcgacgggaccctactgccgtgggtcacccagaaggcctcgaaccgctacgcgtggctgcgctgggtcgtcacgggcaatctaccgctgtctttttgcgagtccaaggaaacgcgacagtacgtattttcatatctattttggggatatacatgtgtgctaatgccgtatgttatgtagatacacgaagctaaatcccatctccgtggagacactgaccgccatcatggaggccgtgaccaaggccgtggagacgatgatcggcgacgccgtgcccgagcgttttggtctggtccttgatgggtggacccacggcacggagcactacatggcagtgtatggctgctttgagacggcgacaggcccccagtacctgctgctgtccttaccgcccgtcatggatgaacctgacgaccagctgagcgctgacggccatctgacggcgattaaaaggttcctatccttttttggtaagtctatctccggatgtctattcctggttggtgacaactgcggagtgaacaagcggctggcgaacctgctcggtgtgccgctaatcggctgtgccagccaccgcctgaacttggcggtgcgagactacttggagccccacgacagcatccttgaagaggtccagcagcttatgcgtaagttgcggactttaaagcaagcagccaagttgcggtaagtactctgtttgctgttttatttggtttttgtattggtactaaattggtctttgtttttgggttttgttcgaaattagtgccaagaccccattggccgctgtcctcagacaggacacgcgctggtcgtcgaccttttcaatgctcaagcgctattttcggctccgtccgttcatttcggcggacgacgaggagctcgcggacttccttccgtcacgctcagcccaccgcaagctggatactttgttggcaagccttcgggacgtcgagtccgtgtccaagcacctgcagggcgacggccttacgctgctggacgctcgtgtcctattcgacgagctcctcaagagccacccctccttcgcgaagtatctcggtaaggatcatcgctcactctgcgtatgatggtatttctacttaactactgcgttttatatgtttttatttatgcatagccacctacgcggatatagtccactccgccgtcttcgagcaggcggtcgtcaaggccctgctgacggacgacgaagtcgctgcgctggagccgttcaagcgcacgcaggctcatgtggaaggcgtggactgcacgccggcggacaaggaagggctcgctgtgcgtgcgctcaagcgacgcaaggtagctgctgcgccggccacgtacgagctgcttaatgcgattcctcctacctcaaacatggttgagaggatcttcagcattgcgcgcgctgtgctgcgccatgagcgccaccgcctctcccccatgatgctagagatgatcttgttcctcaagatcaacagctcgtactgggatgttgcgaccgtggagcagtgcctgtaagtaggtacagtcgtaacatgattgcagtaatttactgtgtcaacactatgtcttgcgttatttatttagtctgctactcggatgcaatgcaatacgagcgaacgctacggcttcaacttcatcaccgccttctcctcgtcgctttgcggttcgtcgttattcgtcagatggatgcttgggtgcagtggggtcaggctcggctttgcgctcgcttgtccgaacttcttgattaaggcttccgtgtatgcacgctgacagatgcccaaagtcctcgctccatgtcgtactggatctcgatgccgagaatgaagcgcgcgcgtccgaggtccttgatcttgaacttcccagcaatctcagtcttgaccgaagtgatcacatcttggtcacgcgacgcaatcagcatatcgtcaacatagagccagactacgcacttttggtcgccttctcctcgcgtgttcacgcatgaacctgcgtcagtaggcttgaaccccttcgacttgagatggcggtcaatcgtctcattccactatttattatggtgtccggcaaaaaatagatatatatcatattctcggcatgcctggatgataggcaaggtgccgaatggcagcccccaatattggcccactaacacgttgaatggcgagatcccccaaggcaattgtcgtcgagtgccgaagatgtcgagtgccaagaatcgtgctcgtgactggagccgtagtcgtacttgtgctcgaaatcgtatgcgctcgggttgtcgtagccagagtcgttgcagtagatgtagtcgtgggctgtcgtaggcgtcgtttgcgtggttaagaagccgtagtcctggtcgttgtaatagtgtaatcgtcatcgtgatcgccgtcgaagctgtagtcatggtcgcagtcatggatgcttccactctggttgtcgttatcatagtcgttgtcctggtcatcgatatggacgtgatgttgtcgtatttgtagtcgctgtcgaagtcgtagttcgatgtcgaagtcgtccctggcgccgcgcacgggaagctgccccaatcggtagatgcctttcaaatgtgccgtggtgacatgcgcgttggcaagttgagcacgtttagcgtgccaaaagccccatgaagagtgtttgggaggcgagacgtggacaagttgacaagcgcgctgctcgtgacgatcccgggtgtagtagtaggctgtttgaatatcccgccgataaactcgtagtagtcgaaggcgaacggagctgtgcgtacagcacgtcgtaggcgtcgatggcgggcgggtggtgggcaacagccaaatgatcattaaccaaatggattgccgacgcccccccccgcgtcgatcatttagtgcggctctactggcaatgcaggactcttgccgatgaatgtggcgtcatcacatggacgcaccattatcgctctttcaataaaaccgcggatgcactagcgaagttagcgatggacaccaaggtcagtcgccaggtgggaagcgctgacactgggataccatcgggctgctgggatgacacgctccggtacacacagatggatcagaatgagtggcaaactcacatggatgtcttgtcacaacgcacgcccaggaccggccatccttaagaagaagaggctgctgtagacagttaacgacgtgtatgggcgttagctgcggatgttggtgatcgttaggactacgcactaaatgaacacaatatacatcacctgcaaaatgaaaaatgtcgatggcgggcgggctgcatgcgtagccgccgctcatgtcgtagatgttgaggtagagtttgcccgattagtcggaaaaacagagcttcacgtacagcccaccactgatgtcgtagtcgtagtagaggtcaagaggcgagctgcacgtgcagctgacgttgtcgtcgtcgtcgagggcgaaccggactgcatatgcagcccgccgctgaagtcgaagtcgtagtcgacggacgacactgcacgtgcagctcgccgtcagattcgtagtcgtattcgttgatgggagcgagacttcatgtgcagccctctgctgatgtcgtagtcgacgtaggcgggcgagtctgcgcgtgcagctctctgtcaagttggtcgtcgtagcggtcgaaagcaaacgctttggtcgtaagtccgcagccgaaatcgtaattgtagtgaatagacggcaccgagattatatgcggtaacggggctgcgagtacagctcactgctcatgtcgtagtcgtggacgccaacagagattcgcagaggctgccgatgatgtagtcgtggaagtcgcaacgaccgaatttgtagttgttgaaggccaaagatgcacgtacagcccgctgctgatgttgtagtcgtagtcgcaacagacggacgaggctgcacgtgcagcttgcagccggattggtcgtcgtagtcgagacaacacgtacagctcgtagtcggaagtgcggtcgtagtattcggacgagaacaggttcgtagccatcgaaataacagagctgcacgcagagtccgctgccgaagtcgtaaatgtagtactgtagatggaggacattgaggtgtatgcgtcgaagcaagtagagtcgcgtgtacagcacgctgccctagtcgcagcgtagcagatggacgataaggagttggtagccgcgacagcgaacggaacggcacgtgccacccgcggttcaaggcgtagttgtacaagtcgagcgagatcgagttcgcaagtgttgaagcaaactgagctgcacgtaccgcccgtcgcagacgtcgtcgttgttgtcgtaatagtgctcgttgtcgtagtcgtagttaaacgggtgagactgcacgtgcagctcgtcgccagattcggagttgtggtcgcgagcgggggtagcccgctggttgaattgcagctgactggaaacaccgagttcgtagtcgtcgaatgcgaacggagatgcacacggatgatgtggttgtagtcacagtagccgggcaacatgaactcttagggcgtcgaaagcaaacggagcggcacgaccatcccgatgctcaacttgtagtcgtagtgcgataataagatggtagccttcgacagcaagcgggactgtgtgtcaagcccgctgccgacgtcgtaatcgttgtcgtgagagtcgatcgataccgagttgtagttgatgaaagtgaacggagccgcacgtagagcccgccgctgatgtcgtagttagtcgtaatagacgggcgaaactgcacgtgtagcttgctgccggagtcgtagtcgtagtcaccgaaagcgaacggaacagcacgtaaagcccgctggtgcagtcgcagtcattgaagtcgagcgagaccgagtagccgtcgatcaagcggtgctaacagcccgcgctaatggcgttgtgccagattcgcagtcgtagtcgtcagaagagatcggaactgccccgctggcagctgatatcgtagtcgtagtcgtagtaaaaacaaacagaactgcgcggccagcccgctgccgatgttgtaggtactgaaggcgaacttacagtttgcctctgttgtcgtagtggttgcccttgccgattgtcttgtgcgtactgctagcggatcgaggcagtggtggcgcgttcgtagttgtagaagtcacagcagtaactttgagccgaaatgcctgagccgttgctgtcctgagtactgtagtcttgtgtttactgcttgtcgttgtcgaaattgttcatgagtcttcgggagcgccgccaatagatgcacatggacgaggagaacgtgtggacacatccgccgatgactcggaggatccgacggcgacgggagagccggcggcagccgggctctggatataccaatggctggtcagggagacccaagtatactgagatcaagtcaatcggagcccgggagtaatccgtctgatgagaggcaccaacgagcacaaggagaacaagaaggaaagcaggaggggaagactagagagtagtttgagagacgataacatttaatctcacttcggaatttgccccctcaaccaacagaagtagtcatggtcgcggaggcgttgtggagcgcgtagggtctgctgctcgtcgtggaactcctaactcctggccggtggccgctaaatgttgtcggatgggaatcgttcttaggcttaactttcctagtcggcggcataaagtggtgcccgcgtacgtcgggcaagactgttactagaattgtgatcaattatgacttgacgttttggaacgaatgtcgtagctgagcaattaacggatagcgccaaattgcgtacccttctcgaattgaaaacctcatctcaaatttgatagaatttgctcggtatacaaagctactgtaccttcgccaatttgtatacctcaaccaaaccgtatagaacgttgagtacttaaaattttcttggaactccaaaatttatgttaagtttagcatgttaacatcttctgattcgctaggggatgtcttgaaattgaaaatcacattttattttacatgtatggattacaagtctggatattttgtagggagctagttacgttctgcaaaagcctctgagacgtcgtgacattgcatgtaccagtattcaaaccgtggagacacccagagttggttcacaacgcctgtcatgccgttagatgcaagcagaacttagagccacgaaaaccatttttttctttggttaccttacggtaattttgcgtaaagttccaaaaatgacaaacagtgccgaagacaagtatcactttaatttaaagataaaacaaccggatcttgcttgccatatttgacaaagtatcgtcggagctactttgatagtataccccctccaatttgtatatctttctaaatttaacaagtgttcaattcaatagtatgcgtatacaaatcggcgttttccgttagatgttgtgacgctgtagtgacaaagtacaaatagtcgactgctctctgtaaaaaaatacttcaactcattattgttctaatatttgctccagtacgagtcgcgggaggtctacatcttgtcccaacgttgatgtagactgcagcccggcacttgcttcgtcaagacgcttcaccaactgttccaacttgtgccgctcctccgacgtgctctccttgaacaggtgcatgtcgctagcagccacgttcgggtgacgttccacatacttcttccgagacagctccgtcacgtccgagatcgacttcagtaacggggtgaccacgtgtgttgcaagagcgaagtaaggccgcgcctcgaattcgccgacggttttgaactcgcttgagattccaccatatattatagtccggcgttgggtgctggggggggctggcgttgcctgtatgtgccgcaccaaccggactgacttccggtagtgccattgtgaattatgtttggttcatctgaggtacgagccggcgaaaacatgtttgtttgttaagttgaccctatcgtgtaattcatgaattactaccccgcggatccgtatccataaatcttcaccttcagactcaggatacgtcagtaattcaatacgactcactcaactgctggagtcatagacaggaagctgtcccatgcctccaccgtcttcttgtgcttacgttccagaaacttacaaaactgttgtgggttctccacgcggacgaacttcttcatcacgagcgggtcacccgtctcggtagctcctgctttcaaccgactgaacactcgatctttgcagtattcgtcgaaaacttccacgaagacctcgacctagacacgaagaaaaaaattaatcaggttgctcagacacaagacttacatcaatagtgccacacgcacctcgtatcttccatcgatcgcttgctttttgtaattggttacagggtacaagccaaagagggggaaggcgcaggagatgccatcgtagtagccacgcatctcgcgagagagcgcaagccgattgttcggatcttgatcgtattcggcatatcccggcaccaagtagcaccactccgccttgccataaggggtgaaaaaccgctcatcttcgatccgctgacagcgaaactcggccgtcaagtaatccagcaaccgggtatccaagtccaaaaccaccgactgttacggggaagtagtatcatcttgcggcgtgaactggtcggcaaaaatgcgctgaaaagactgcaacttcgcagacaccgccttcacggcgctcgtcaccttacagccattcaggggagaaccaggcaacatccaatccccgtgaaggacggtttcgaatcctaacgcgttctctcctacaaacaactcagagttagtttatgtaagtaatccaccacgtataggactatgcagcaacaacataggaatgatctcacttgtatcgaacactacgtggatgtgcagcgtggcgtcttgttcgtaccagaacgctctatcctgtccgtcaccccgaagtgcaggatcatagaagccgacactctgcgccgccgcagcgtaaagtctggcgcgaatccctatcatctcgagcgcgttttcgattgctgccgtcacgagccacagtttcttcggaattaccaccagtacgtgaacttggcccgaacgcgactggaaacccgccccgaagtaatcgttgagcacctgcaaggggtgcatttgctcgaaagcttctagctgtccatccacatcaagtgtcaggcgcccgtatccgtcgaacgccgctgttgacagttcggtatcagcactaagccactcgttgctgcttttcttcgccaggaagagctgcaagtccatggcaccgcatgttatagtttcatcctctatcttgacctctcttctcaagcgcgccacccgcagactcaggtcgattaagatggatgaacagagctttgaaccgatgaccgcgaagcccacttcgcccgtcatctttctccgaagaggaaggcaaggctaaacaagtagagattgatggctgaagacactgcctcccaatacatcaatcatctgactttgatgcaggtgaaactcagttcgacttcaagcatgttcccgtccagagccattttatccacatcacttggttttgttgaacacgctggaggttgagctcgaggagctggaaaaggatgacaccgattcaatcatgaccacgagcgtcacgattagcaaactcacgctgcagaaggtgttcccgcatctgcgagacggtctgtcatcgccggcggagaaactcgtgggacggcgcatcggcatgcgcggatcgacacgctttatgagtcaagggcgaattccgacatgctgactccgatgctgcgcccgctcgggggcgtcgaagacgcgtcttgagtgttcgcacacttgcattgggtccaagactcagcaggctggagctgtgtcgagctccagttcaggcagttcctgctcgagcttgaagctgttgagttgcgcgccgtaacgtcctgcaacatgccttgcagcaactttcccacgatattccagccaatcacctcgcgctgccgttacgacgctttgaacagccacgctaaaaagatcgaaaatagcggacagccgggcacttgctcacttccagcactcgccgtacagcttctgctcccagccagaccgcccagcatgtccgacgccgccaccaagaagctctcggaggagatcgcgcgactcgagatggacctcaagacgctcgaagcctcctgcaccacgtccgaagcggccaagaagtgagtccagcgaccgtcctttgctccataaattctcgatacatgcgcttacgtttgcgtgcttgtccagaatcgccgaatactgccagagcacggcggacccgttcctcggagagaacgacggcggcccgaacccgtggcagcagagcggccaaggcggcggtagctgcaccatcctatagtgctcaacagcgttaggactcgcagcttcttttccagcttctccatctatctatttgaccgcattcggacaaatacaaccttgatttctgctcctcgcgatgcaaactggcagtctatattatatacctgaacgcctctccgctgcacgactacttactgggtgctgccgacttcttgccggacggcttgcctcccttcttgtcggcgttcagaaacgcatcgcccttcttgccttcgaaaccagcgcgctagaatacacagaaacagcaacgtcagtacactttgctccttagctcatacagccaacaagttctgtctgtagttgacttaccggtccttttcggcccttcttctcggcgggcttggcggcgtcctttttgccacggccaagcgagttggccagcttcttcttctgtcgctccttcttggagacctccagctttgcagtacgctccttccactccttggagctcttcgccttggccttctccttcttcttcagcttggcacgcagcagcttcgggtcgtccatcacgaccttacccgcagcctgctgaagagccgtgtcccagcccttggcctttgccttctccttgccctcctccgtcttcttcagctcctccagacgctgagcgttgcgctcagccttcttcagcaggttttggataccacggacactctggccgtggcgtgtcttaggcttgttgtccttctccgtgccgtcgtccagcagcagactaccgtacgagatagacgcagcgtctaccgtagtctccgcctgctgcttagcctgtgcctctcgctcggccttcgccgccgcctccttctcgcgcttctcagccttggccttgctcttgttgaccgccgtcttgcgcttcttcagcgcacgctgctcggccaccgcctcggcgcgggacggacgcttcttgcccgtcttctcctcagccttacgctgctcgcgcatggcctggatcttgactgccagacgggcacgaagaccctccaggccgccctcctccgtagccacgctgggcttcacgggcttcacctgcgcctgctgcttctcctgctgctcggcggccgccgtggccttctgccgctcctcgttgctctgctgcgccgccggcgagaacttggcgcgcttcagcaggttcttcttgcacggctcctgctgcttcagagcctgcacgttctgtggacaccaacacaatactgggcgtcagaatacgctgcacacatcgtccagagtttgagccattctcgggcatcttctccagtagttctgtaacgctatagcagcgctgggagatcctgtcctgggtgatgccgcaccttgtggtacttcttgggcgccgacttcttccagttcgcctcggcgtccgtggggaagtagaaggccgccgggatgttctccatagtgtcgcagaagaaccggtcgtgcgcctgcagcgtgcgaagagcctcatcctcgacctgcgcgtcctgcacggccgcctgcagcagcctacgcccgagcagcatggtcaccatccagccaatgtccaaatgtgtggcgctttgactggcgcacaacctcggtgcctttctattggatgaaatttcagagaagcaggagtgattgtcgtttggtttccaatgaaccctattcgctattccgcactcgacgacacgttgcctcgaccggatcgcgggcaagcgctcgacggcacggacgaaggcagaatgggggtcttcaggacgctgtgggcatggaccaccttcactaccgcctcctgcgctgtatttgtaagtggatcgcggctttaatgagcttctaaagcgctctgtagcctctgatacgtgtacaacgctatcagaccgactaacgctgtattatctcgttgtgtgctgctgtatgtgaacgctgtgatggtgttgctctgttgtgtctgtcttgtagtccgtgtacatggcgtacgtgggtcgccaggtgcgttgggggactgggccagaggatctcgcctcttgaagttggtatacataaagtatacttacttgtggtgtatactgctgcaacaggtgcaccggatcatgtacccgacgttctcggacaacccgaacacgctagacccgctatggggggaaggccagccgctggatgtgctctgctacctgtcgcctcgatcgaagtgggacgcggccagggactttagcgcgggagccgtgcacgtgggggccttcaagtcgctcacgttcgactgggacatctccaactccaggcacctgaacctcaacatatctcgccagacactagcagagctggcgaacgacaagcggacggctaatcagctgtggggcgcgctgaagggcaacgcctccgtgttcctgcacgtgcacgtgacgcacgctgggttttcgccagacccgagggacacggagaacttcgacaagtacagaaccatccaccaggctttgagtctggtgaagtatgcaccaaggcctaacgcaaagaacacaagtttactgctggctcccgctgagccacacgtgggactcaagacggatgcgaaggaagaagaagcttcgacgatttcgtattggaaacccgctgctagtgtgagaatggtgacggacttcacgcggtatccagtggaagagctaccggttatggtgtaccagaacctgcgctacgtgcagcacccgatggatcagcgttggcgctacttgccagcgctgtacgtggatgatctatcacagacacaggacaagcttgttccgctgaacgctacgatgaacgatggtaacggtggagacgtcgtccttcctctgcagttatcgtggtcgccactgtcatttgcgcgttggcagatgcagcttacctttgcaactgtctttgtttcgcaggagcaaatgggtgtgccttcgagcgatttagatgctctccgctcgatggtgaccgacacgcatcctgtgctcctggctgtgacgatgagtgtatccctgctgcacctgctgttcgactggctggctttccgtcacgacgtgtcttactggcgcgctaaaggagataatgtcgtcggcgtttccctacgcgccatggcagctgaactgggctcgcagtccgttgtcctgctatatcttgttgaccaggagtcgacgctgctcgtgacgggtccacagtttatcagtgtcgtcctgctcgtttggaaagtaaccaaggtttggcgcgctcagcgtcgtcagttggctatcaaatctaacgttgatgctgatggagcgtcggaaaagacggaaaagatggacgaatacagtctgcggttgctagaggagactcaacgagccgactccttggccacatcacatatgctgtttatactcgcgccgctggctgctggatacgccgtctactcgcttctctacgtgccgcatgctggattgtatgcctggctactggagtcgctcacaacgacagtttacgctttgggcttcgtgttcatgctcccgcagctggttatcaactaccgcctcaaatccgttgcccatttgcagtggcgactgctagtctaccgtgcgctcaacacgttcatcgacgacttgttcgcgttcgtcatcaagatgccgacgctgcaccgcatctcgtgcttccgcgacgacatcgtgttcgtcgtctacctgtatcaacgatggatttatcctgtggatacccagcgccctggagacgctgccgacggcgcaccagcaacggaaccattctccaagccccacagcgaataaatcaacactacgtgattttgccagccccaaagtactcattgcgtttgtcttgcaacaatcgcacatcgcaagtggcgatgtccatcgtgttagtctgttccggtaagcgatgtacatgtacgaggaaagagatatttggtgtctgttcactggatgcgattccaatttcgcgactcctcaaccacagattccgagcgagcaggcgcgatctttccgtgcttccaacagtcttgaccaggataccagtcttcaaatcgccgagttcgccgcagggctgcagacgctgagcaagaagtcaagtgcacgagcgccaagctcgaagtcgttggcgcaatgaaaattgagctgtgtctactcgcgctaggaggcgtcgtagcacagctaccaccggagggtcctgagaaccccgacctgacgcagccatcaggctcgaaggctgattcggcggctagcttttcgggctcttcaggcgaatctacgtggacgaccgccgggtgggcctcgggctcttcgggaaccgggagcgacgcttccgcgggctactcgagtggctccgactgggggaataccaattggggcagtgttggtgggagtggcagcgactgggactggtcatggggtggcgacgcacgctgggaccccaacaaggagctctggcactttcgtccgtcgtggaactgggactcgccctacccgcctgatggcacgatctacccgcctgatggcacgatgtatatcgagaactgggggaacccaccgacgcgtgaagttccttctcgtcggtcgttctacctcggggctgagaacggtgtgtcgcttgcgggggctacagtggagggtggccgtgccgactgcggttggcgcgactggtgtgttcacttgacgttccactcgtcgtatggcgtgctgtcggatttcgacgccttcgtgctggatcgttacgacagtgctgaccggatctacggcgatggtttgtggtacgctctagaggatgaggaagggtctcctcgagctttcgcgccgctggtgctcggtgggttttcacctgaagagcgtgctgtactcggaaacatttctagctggagggtggaagagatggcaaggcggttcaacgagagccgtgccacaacgtggacgctgtaccccgactcggacgagatggatgtgatcttgagcttcaagcagctctacacgctactgcccggctatcccgatggcaacgtgactcggagctctcttaacagcgagatcatctctgaatggggacctgctgatcaagtgttgcttcgcgtgacagctaaacgtcaggggagcggtgccacatcatctatcatgccgcgcgtactcaacttcacgggctcgcagctgttccaagtcgattatttctcgtcgcttgagtatccgcaacacattggcgaaaatctgaccgcttcacccaacgcgatgacgcttgacgtcgtgttcagccgacgccgctatggcagcggactcccgtggaatccagcccgtccaagcgatgcgtgcgatgcctgcaaccaacgagtcatgaaccatccggtcgtggctcgatgtctgcatggcaccgtgccggagcgtatctttcaagatatctacgagcagtctgcaagcgagcagatggaatgggatggaggtgagtgggcgctccatcgatcttgagctacagtctgaacgacatggtggatgcgctggttgctaagtgggcagactaatgacggctcgtggtcctcgggctcaggattcccagatgcaggtgatcgaaggtcttcatcgggatctggctatggtgacgcaggattcggatggaccagccccggattggggtcaagcggggacttcagatacaatgacgccagatctcgctggtcttctgagccagtctaccgatacgatgagtctggttcgcgttggtcttcatggggatatcgagacgatggatctgcttcaagatttggtgatgtcgctggtcttcgtccggatcatcaggcggtccagacgttggggactggccttccgtcagagacttgcgaactgcgttagcgattgctcgcgagacagacgctggtattcagtgctttgtcgagtcgaggtgtcctgttgggactcgtagcttcgctgaggcagctggccgaatggttgtgttggagcatgaaagtgcttttgtacgcgtgaatttcactgagccaagctacacgttttacgtatggatggagttggagggtcttggccctgaaacggagtttaggacgcctgacctgtcaagtaataacacccccgaggagatcgctgagttggttgctggagctgtgcccaatgctagtgaatataatctggctgtggacgtgcgcaagttcgacaactcggagctgattgcctggataaatatgctcaacgagtggatggccaactactacaagtcgggaggatccgagtctgaggcatccgccgcctgggcagcgtattcttcgtcagcggatggcggcagctcttttcagttcccacccgctggtgaagcttcaggaagtgacaattacctaatgttgggcagcagagtgatagcgtggatggttcgtctcctgatcctggacaagatggtggatcaggccgttggtggtttggagagccattcccagtaccagagccgtgcagatctcgttccgcaatgtcagcgtcgtgccaagtattattgaagttattgcgattagtgacgagtctatggatggcgatggcaagtccaagatttcctatgattatcgtggaagtgagcttcgcttccagctttctccactgaacttgaccaagttcgagtatgtgcctcctccgccgtatgtgaacctgacctgggacgaaaatatccctgactgccccgatctctactggaacggaagctcaatctggaacggctctgacatttggagtatctgcagcgagtgtgaagatgcattcgctgcctgcgacagtagcatctcctgcagcattggtgtgcgaggtttcttggaaggggctctgtcaccgagccgttttaacgcgtacgaaatgtcgactgagatggacaattacaatcgtcggccgtggggtgtcgacttcggaccccaactacgccagtcggcatcatttttcaccgctgaaggctatgacctactcatgaatttcatggtctgtctcaagaaacccgattgcaccctcgatttgcctcggcaggcgtacaactattcccagggcgaatatattacggtggagccgacacaattggaggtcattcccgcagaaagcgtgtttgtggtgccgactactacaacaggagacttggaaaacattgtcatgaagtttcgaggcaaggaatatgtgctcgagtgggcgaactcgactgaagagaagtatgggagctccgtccgtgcatttgttgctaacgtaatgagcgactacaatgaagacagcatttggacgcggaacccgtcgcagaacgcttgggtggatgtggactatgaatctgactactacagagatggagaatatctcggtcaccttttcagacttacgttcgcagataacttcttcatcgatgccgagcagcctcggtttaggcccgtgtcttccgatacctacgacgagctgaactcgagtaattggaaagtgaacgcatacgcgtaccgcaacttgtacgacgagggcatttgggatggatatcccttggttacttggcgaaagctcgcgaattgtctttctgatctgggctacaattcttccgacttcagcagacctcttgtttacggtgacgtcgccgcggaagatatcaacattggccaccaatgcttggatgcgtggacgcagtgcatttcaaacccatcctgcgcagacgccatgcgccagaacgtgatctattccatgttgtaccccattgtgtactccaatgagcctgatcagcgatcgtcgatggactttacggcaagcctagcttggtggcgagaaagtgctgaccctgaagtgtacgcaaatgtacttgagttcctgtcgtgcctgagcaaggaagcttgtcctgtcgggtacgcgtttccttcggatccttcggcatctcttgtgccagtcattaccgagcttgtgagtcatttcgcggtgaatatgcccttggacagggcgatagttgcgtacgccaagggcgattcctttgagttcgtgcctggcagtacgccaacaagtgatatggaaagctggctacaggcagcatcaaactatacgtccgatgtgaaggtgcagtcgacattgacgaatgacagctgggtccgcttcgaggtcacctactacccggcagtagcggcaattccaaccttctactttacagacgacgatacttttttgacgctggagggctccatgacttttgcgtcgctgcagctcagttccaatcgcgttcaatacgggcaaagtatgtctatctcgctgctcgagtcctggttttcggcttgacgcggtgccaaaacgatatggactgcaacgcatcggcaagagatgtattggttccgctgttgcgcaacgccacgcttcctgtcctaacgagcacgcagggcactggacaaacacaagtaagactcgacctcagctcggtacttttgtcgttggaaaacgatgcattccagtctcgagagggctggctggctttcgcgcacttgcttcgctccatttcctcatgcggttgtgaggtgggattcggctattggggtgggtcgcgctacctcgagcctactcgagttcgtatcgagtccgactccgttagcgtaagcgtgcggctttacccgaacacccaactggatgtctggttcaatggcaatattttctcttactcacctgatggagcaagctcacccgatgatgccgctaacaatttcctgaactggtttacaacgacggcgaactcggagcccttttatctggttgtggatcatgtcgacacaactgtcgcagtcggccacggtcacgatgaagctgtacgaggtttacgatgtggacagcgaaagtcagcccctcgtgaaccccaactggatacccaacttcgttgttacgtcggacgatgtatctgttgtgccacccgctgaagtgatcgtcacgccatagaaaatctaccttgagtctgtggaccgctatcccgtatttgacaggcttctggacttgctagagtacggagcagtatccggtgaagtgccctctagttcgagtgggtcttggggatcgtccacgaatggcaactgggcatggtcagcgagtggctccgacgctgcaggggcgttttctggagacgcgtgcgctaggtgtgccgacctccgacaggcctgctttgatgacatggagtgtcagtcagctatcggtgattatctgctgccaactctagagactatgagctcctgggacacccctgacgggttttcgtacgatatgtctagccggattctgagtaacgttttcggtcagatgcagtcgtcggggcccaaggggaagttgttcgcgctgctcacctgtagcgcaacagagtgggcctcgacagcaagtcaagaaggagtattctgtgcccagctgcaggctcatacagaataccccgacgtcaacgtgtccctcgagattatcccggcattcagcgtgttccccatcagccaaggccagggaagaaccattaacacgcccccaggcaatctgctgtatcccgctggcacccccatgtactacaccgacaacggcaatgctgcagagctggccgacttcttggagaaccaaattcttggcggatacgacaactcgggcgtaagggtaaaggtctctgctgatttgaactcggggatgtgcaacatcatttacgacgggttgacagccccctcaacgccatatatcgaaggcgaagcgagctcttccacaacgcagttcaagttcttcggttcgacacctgacttggtgggcatattcagaccgtggatgcagtggcttgaccccacactgtccaagtaaatctcaagctttttaagtgttgcgtcgtgaccaagttgagtgcggaggtgggtaagttacccatcatgtgacaatgctacgaggagaaggtaagtagcagggaggatctagttttgcagcatttcattcaatccattatcgttatcttttcatccactttcagctttgtaagcaattggcattcgactttacaggcaacacaagcactatcaacgtgtacaatgaatagaaggcgacatcaaagctgatcagcatccatttcgtagtcggcttcgtccgagcttgagtccccatcttcgaacgagccgctactggcggagctaggtgccgagagtcgctcagtcagcacctcctgcaggtggttcacgtactcgaagcttgtcttgcagtccagcgagcaaaatcgcccggggctgctagcagttccagacccagaagcgaagaacaagcgctcgcagttcgtacagtgtgcttgtcgttgccgccaagaagcgtcgcagcaatcgcccccaacggattcttctcctcgaggctgccgagctgttgtgcgcccaagtgccgaggagatggtccggtccctccaggaatgataatgttggcgctggcgtggcgaacgaagtttggtgaagtggccgtgggtgctgccgactccgaccacgacttgggtcggctctcttctgtagggcatttccgagtgaacaccatgcgcttggcgaagcttgggcggcgtgggagtgggagatctttggcgggactcggatggagctgaggccggcagtggctgagctcttggttgtgtcgctctgggtgtagtgtggtagtcatggccgtagatgttggtgggcagaccagtggtcgcttcaaggcaaagtgaagaatgatcaccgacgcgggttgatcgtacgagggctttcgctgaagtaacccgccatctcccccttgtcccggcagaatacgctgtctgcagactgtcgccgcctctcaaggggatgaaaatgcattgtgtctccgagcgagacgaggagtacacctcgcgagtatgcggctcaaatatgttcacagcggtatttagcaacacttgcagcgatcgtgttgtccagcaatctgcgctccgtgtcagatactgactcacgacactacacctttgccaatccaagttggcagtagtgtaaggcaaagccaagagtcccgtaaatacgaaaaatatttttttcaaaaatttattttcgaggattagtacagaccaatgtggatttagtccacagcaaacatctaagttccatactccatggactcgctacgaatagcagcggcgacagaccttgcgtccgcttacagtacaggttgtagtagttggtctcgtcataatacacgataaaagcaccgttccgctcatgcttcagcaacgcatcgttcattctttaccaaaacctgtatgagagcgtcatggcctcgctgaaggcgtatcaatttgcgccataatcgaccaagctgagctgaagatgaccaatatgacttgtctagctgcaggctgcattttttacatgtcaatttgctcaatactcaatcacttagccgaagatgcccaacctcgtgtctctcgccaaaccaaccagctcaactcgacagtgacacgagcattgttcgtttgaattaggctttctttacctgcgttgaagcgcccacttccaaggacttggcacattaacgtttctcattccgcaatttaccctcaagttaaaaggtcaagatcagcgcaccatgcatctctccttcgttccgctagctctctcgtctgatcgttagcacacaacatagtactaaatgagcacagtataccttacctgcaaactgaatgaaatagctctctcgttgctggcgtcaacgcagccattggacgctgaccagggtgttattcccgggcagcctgcttcgcagccgcagtagatgcccatgttagtatcaactagagagttcggctggtagtgctcttttaaaatccataatcattactccccatcggtaggataagaaggatggcgcgcctaccggtagcctcaactttaaaactaaatgttgctcgagtgaacgctgttcaaacgtcctaccgacattcatacgaaagaggagataacagcgagtttggcatttacttccgcatcgaatttgaccaaggtaagatggtaaaaccccaagtagaaaattgggctttcgacaaatctaggcacaccacgatttgagaaattttgccatttaggtcctgaaaacgcgtcattaatgcccgggatggcaacgaatagcgagtaataaggcaggggtgcactctagtagccgtgaatagtgttcattgccccaattgtcgagaaacctcttcatttggcttgaaattacagcttttggtaggcttactttgctccccagtaactaatgtgcacagaagaatcttgccatcatgtttagctagttagagagaggaaatgacgtacaagaaggatacgaaatatttcaagcagaacaatgatgccggtggcaatacctcaaagtatttgtctgggctacctagttttactttttgaaccgtctattcatgctcctgtcagcctccgcaggagctcggaatacgaatcgagcctacatctcatgcattataactgcctgactacacttctaaacctctagcgctttagttttgctgagttcgccgctactcgcagttagaagctatcatccaagtctacacggcgcaagtgccttagatcgatacacccccacgtctccgcctgcactttgtactgtctatgatggacatatgtcgcactatacaaactttcatattaaaactaatctttacgcgcctactagtaggattgtacccatgctactggtatgctttcgacctggggagaagagattaaaagaattaaaaacaacacaactttgggatttactcaattgttatccgttatcatcgtccatgaaactattcgccgacctgtgtacagacaacgacttacaaagccggcagacacaaaaagccggcagacgaagtcaagcaaagcttaacataagcaaaccagccaatcagattcaatcaaatgacttcatctttgtataccatctggttttgtgtactttatatgctttcttgtgtactttatgcaacacgccgtgtgttttatgacagtcttacagatttgacgggagggaatttatcgttgtttttatataggaggatgacattaagcatgccggctttgtaagtcgttgtctgtaccctcccggagcaacgctccgggttgcctattgttcctttctcgactgaacacacttgtgatcttgaagacccgtttgggccgcttcgcacggcacgacagtagtcgaagaggctaatgttgtggagggaagggccttgaaagaatgtggtagacttctgataaaaccacgcagcgactcggtcgaaggtgttccaagcaccgcacgtacaatcaccgagaaccaccgcttgtactatgtagtaggctgcactactgaacaacagacacagacgctcgttttcaaagacttttggttattttgttagtttactcttcaactggtagtagttgatatgcaccgataaaaatgtacaggcaaatatgggggtgcatcgcgtcacgtactcggttgcattccatcagatcgctgcagccgtggtggagtggcaataggcgagctgatgctgctgtcgaggtgggtgctgcatacgtcgaatatggctggcacttgcgtccgcgttctcttcgccctcgagcaaaacacgaacattcttcaagcgctgttcgagcgcgcgcaggaaattgttcacgttcttctggtcttctaccgccaacgcaccgatgcgtgacccattcgcgcctggtgtatccatgagtaagctctctagcaggagcagtgcttgcaggtagtggtcatgcgctgcgcgtgtttgccccaagacttcacgaatggcaccttggcgtccaattctaagcgcgtgtgcatacaacaactcttcttgtgatgcgatagggcgggtcgaactccgaaggcgtgcagtacgtgccatacgcgccttgcattgctccgcacgatccaaaaagtgtgtcagctgctccgatagaaacgccatcgacacctttcgactggtttcgctccaactggatggggcccctgatgacgaaccagatgatcccatcgagcctcgagactgagcgaaagctgcgtcctgtcgtaaatacagcacaacgtgctgtacgagacgaaggcacttcacgtacaatgccaatgcctcggcagcgcacacatactggcggtcagcggtgcgcttatcatcatcgtcatcatcatcgtcgcattcgtcatcatcaccaagcgcgttgctcactccgattgacgaagctaacgacgagctcatcgaaaagacggtcgagaagttgacgccactagcacgctttccgccagaggtcgacaacgacgagttctctgcaacagtctgttgtggcgaccagccttcccctgtcggctcacttgtgtgctcggtctctgagacagcatccccagcagcgcttaaagtccagagctgatctgcgattggtgcgattgcttgcgtacgcagcaccacaatgtcgatgagctgttggccgtactcgcgagaaaaggtttctccagcactcgtattcccacaactgaaggtagacgtccttgtcggcgcatctgctggggcagtggcattaggttcggtgcttccaacctctccagggccgacgggtcgaccagcaggtccagcagtgacggatcgttcggataggccatctaccagcacgtactcaccactgctgtccaacgcatgacccccaccagcatttttctttgttggcgccatagcctccgtattgcttgatggagtggtagcaggaatcttgatacgagacgaccccgtgagcgaatggtgctgctgttgaagcgctgcagctccaggaggcgactctgggagctgcttgaatgggttaatccttgggcttggactaggactgggcagtacatgtgggctcatctgcgggctgagctttggactcacacctgaacctgcagcagctccgctgccactggatgtggcacgacgactgcgcgccagccgtgatgacgacgaccgacgcagagccccagatccggaactcgcgctagcaaaggcagtctccatcacctccaggttcccactgcgagattgccgcatcattccggacggagccgtacttgcaaaccgcgagcttgaggtggacgagtcatgagaaactgagaacgcgcgagaccgacggtcacttcccgagcctcgacgaggcgtggtcgaaggggttgaacttccagtctccagctcgtgttcagctactgttctgctgctgcccgcagttgaaaagccccatcgccccgaaagtccctgatcgtcttcttcctcctcttctcgaatgctagcagtcgtcgacaggttcgacgagcgacgcacagcttcagcctcttcaacctgctcgggtaacggctgcagatccacaaacggatcggagaaaaattcggcaaatccgagtcgcagcgccggctttcgctgcagcaaagccaccagcaggtgtcgacattctctggaaagctgcagcgatggcggaaaccgcagcggctggcgctcgatattggccagaagctgcacgtggttcgctccgccgtagggcgggcggcccgccaccatctcgaagaggatggtgcccacagaccaaaggtcggccttggcgtcgtacttctggaacttcaagatctcgggcgccatgtacagcggcgacccgcacagcgtctccgccatggacgtcgtggctaagtgtcttgcaaacccaaagtccgctgcatcagcaccagcattaaaacataataccgtgtgttagtctacaataaaaataataaaataaacaataagtaaaatattccgcacgcaccgattttgagcgccgaggtgggcgagtcctcgacgagcagcaggttctgcggcttgaggtctcggtggatgaggttgtgctgccagaggcactgcatgcccttggccagctcgcgcaggaagtgcctggccacgtcctcgctcagcagcttggcgcggtcgccaccctcctgcgcgcggcgccgcatgtactgctgcaggtcgccgccggcgcagtactcgagcatgaggtacatgtgcttgtccgtcttcttgatgtcgtagagcttgacgacgttcgggtggtcgatctggcgcatgatggcgatctccatctcgaggttggccagcagcttgccgttgagcttgtgcagcgacagcgccttgatggccacgggcgtcttgctcgtcttgtggtagcccttgtacaccacggcgaacgagccgctgccgagcttgctcgtcaccacgtactcgccgatggacgcgcgccccgccatggcctgctccaagagtgcgcaatcaagagtgatggtcgctctcaacccaggcgaagcggaggaaaaaactgcgactgagcgagtgcggaatcggtaatgtgactgtttttctcttctcgccgccatgttgaaagtggtgtggcgcacgtaacagagggtagggcagaacggtcgacgcgtggggggcgccgaccaatcacacgcgcgctgggtgacgtcgcaggctgacggagttttcctgtggctgctgagaccgacgttgaagcctggccatcacggctcaggcgttttccggcaggcttgacttgctgcaactgctgcaactcggccatgcactgcaagagggggagggaagcagcatgaggaaggcaactagcacgagatggtgcgccagtattttgttctcttctctgtgtgtgtgaaatctagaaccgccccaagcggcatttcgctgctctacatacaaacacgaagtgtgccgcggatagaaacggcgcagtgttgaagtgccggtttaacggagacttgcctctagcatcgagctaccgtaccgactgggcaattgcccccatgttctccgcagaagcaatggttggctgccagaagctcgcggtggatgatggtgccccaggaggcaatgagtgtgtcggctccatgttggacgaaagcggcgcggaaagcgcgagaagcaggtgaacgctgctgcggggccaacgcaacgcggacgtgaatctggcgccagattcacgttgctgctgtcgttcctggcaagctccccgcggttattctcgtggattgttgctcaagagaggtacagcatgtaccaattcaaaaatcccatgcggtctgaaggcggtagcgcgaaactcgcccgagcgcaacaagttatatcacccatacagcaattcttgttggtgatacatgggttgaacactgttcaatgaacactccaagaaaataataaattctccatgttagcaccaactcatcgatcctatctattgcgttatccactggaacgtcggggatccaagggatttctcaaacaatcgggacaccaatcccaggcttcctagcaggtccaacatcggcgtcaagaaatccgactcgctgtgatgcttggcacacaatggtagacggcgtcccactcaaaacgcgtccagccacgtagaataactcgctggtgtagatgcttggatgtgtacgtgggcatttcttcatcgcacacgtgtgggaatacattccgcagtgtttgctccgttatgatgctggttgtagtggtggcgaggacggcctctccaccggctttccttagctcttcgatgtcgaccacgatgtcttcgaaccactgcaataaatctggagaatgtgcccttctcctcgaccaaaattgaaggccacatctggtgcaatgtacgagcgcatacgagcaaacaggtctctcatcggcttggcttttgtcgaagtcgattgaaggccgtaacgaaacacgttgaagtacgctccacacgttctcgagtgtcggcacagtggtgcagagggcgccacgcctccgttcaagctgttcaacgactcccctgagacgctttgtgtggcaactcctcttcagcaaccgagacgttgagctcttcctgcgtcaccccgctgccgaaaggaaactcaccgggaagagcgaacaagtacgcggaaatcgaagcgcttttacttctcggcgaaaagatccaacggcagcgatggagagatggccacaggagataccggaagaaccaggaccacagcatcagaaatctcgagaaagaagttcctgcgagggttcaattggggccatgatgccactcgggtaaggttttaaacaggtcttatgcaggtctggtcctgttttgatcctacgacatctaaacgagaccgaacgggaaataagtatgatttccccggtggtctcgtttggatgccgagacccaaatggtatcactacgaaacacgctaattttagaccctcttcactttgatatataatatcgtgatatttagtagtagtagtagatgatatagcttagtattttggggctagttgacttagagtactgctggggattataatttggttcacaacatgtctgaaattcggtacatgtccgtgtggtagacgaatattgcataacaacaacggaaacggtgtcctaaaggtagaattggtcaatataggataatttctagatcaatgtatcttcctcgtacgtttagtaacgaggacctttaagtttacgaagctattactatcgtttgaaaaggcggttgaaaaaggttatgcaaaggcaacgacgacaatggaggggctagccacccctttagcggcgcccggtaaagcggtagtcgccatttgatcagagctggccccttcatccgatgtttgttatattcaaatcaccgttagtttgctgagagtactaagtgtaccggactgaagactggatctcaaaatctcgatctaaatcgtagtttgggccattccaagtttagacttacagaggtggtctatgtaacagggtgctacccttagaacatcccaagatttttaatattattgcatggtggaactattccatcaaaactcggccttattgtctatttcaaatcttcagactatttattcccaacatcatgagattgtccagggttgggagttgtatatcgacactgaaaagacaaaaacggaaaactttctatagtgaaggcttcctataggctggatttctgaacattctcaagcactatgcgattgaacagggagctccaaatttttctctaacggtgtgagtttgtgttcaatcggatttttttctgacaacccaccagctcttcgccttcgccgcctccaccctacaacccctgctctgcgtcaagtcgtgatgccaaccaccaccgcatcaactccgacctcttcaagccaccgcagcgacggtgaattcgaccagcagtgggaatttggcttcaattcggatcgtggaggagcgtcggtgagcgacagtgatgctgacagcgatgctggctatctctctcctgtttatggggatcgagaaccctgtttcagcagtgatggcgacagcgatgatgaagactcgccgactgggactcccccgcgagatattgaagttgacgatgactcggtctccagcggtggctcaagcgtgtcccctcaaggggatgtgaccaggctgcccggcggacttgttctcggttcttcccgctatgacatggacgacagcgaagccagcagcagtttggacgactctgacgcatacgaccctgaaatggagactgttagcagtgaggacgaaggcgacgagcgcgcagttcaaccttctgcgtcagggcgtcaagggcatgcgggaatcgacctcgtcgcgacagcgcatcgcaccgtcatccaactcaacggccatcagtacacgaaagcccgagagtcctcgcgcaagatttccttccggtgcagcttttaccgacgtactccggggtgcaaagggaaagtcgactacagttttgcgcgagatgtgttctacaattttacaccacacacttgtgaagggacgggccaagctccaagccaatacgttgacgtcaccgaggaaatgaaggccgaggttgatcgattgtcgattctgcacctttcacacacggcgcaatagatttgattggcggtccgcgagccgtttttgtcagagacgacagcgcggttgttcaaggactgacactacatcaagtccggcaacgtgtgtaccgcacgagacgggttcatttcggtggaaacgtgcatggaatggtcgaggttgcaccgcagagcctggttcaagggactacattgaattttttccagttccaccacgtctttatggagagcgagcggctacagcgtgtgctgggttgggcggaccctcgactgctggagttacttcggtatctgggctcgcagatgttcgtcgacggaactttccggtgcgtcccgaggtcgttctaccagtgtgtcgtgttaatggtgagcgacgcagcaagtggcgtgtttgtgccttccgtttacactcttacgactggcaaaacccatcaactataccaaaagttgatgcggttcatgaatgactgcacgggtagtcgccttcaacctgggagtgtcgtctgcgacttcgaggcagcgctgatcgattcagtgaccgaccagtttccgcacgccagggtcatcggatgcttgtttcacttcaagcaagtgatccgacgacgcatgatgaagttgcgtatccgaccccaggagatctcgattgcgatggaagtcggcgtgttggacatgctaaccgtgatcgtacctgctcatgtcgatccccacggaatcaactatgtctccgagttgattatgtctcgctgccgtaccgaagagattgagtactcggcggttgagtgggatcgtttctggaagtactttcgtcgcacatggatcaacatttttccagtcgatgtgtggaatgtttatggcatggatttgggagtggtaagccgaaccaacaaccccctggagcggttcaaccgggaactcaatgcagccatctgtgacggggtgtcgatccctaaattcgggtgaatgcacctgaacctgggaagtccccatgatgtggagcttggtgatactggatgatttggagtcttctataaaaacaagggtaatgtctgcgaatggacgctgaatcccggaatatagatcaatgggggcgagttgatcccgttccatgaagtgcaacggaatgcgagcgatcctccccagtatatcaaagtacggcggaactcgactctggcttacaacctgggagctgaggcacttctcagattccccgttgttttcccggaataacgattcccagacttcgcgttcccagacttacctcccacaaaattccaagaacgacctcggcttgaggcgttccgaggctccaaacccaagaacacttggtttcactatggcatcttccaagatcctaggtgtacccaacaactccgagaaggtatccagtttggcgacccttcaaggccagaccaacactccgcaaaaagatcgcagtctccgaagggtcgcttaggaaagatttcgtctgcatgtgaccttcaaccaaacagagttcgttttgcttcgaagggcacaagtgcttctttcacagcctggaaggccgttctccacgacaaaattcaaagtactttaggtaagtgatccactgcttcggcctggaggtgatcatatctattccatatctgtatatttggcggattgcagaccgtctttgttgtatatttgcggtctattgggcctatgtcgaactgaagaagttggcgagagggtagatcgtttcctctctccgagaggtggtgcgcgtccccaagattgatcaagtgtcttggatttggaccagttgacttgtattttggccttagccttgggcctagagaaagaagagagggcaaagaagtatttgtgtgattgtataacgtgtataactctatttgggttggattgttctagcgttagcccggcgtagctgtctgattcacggggtcgatactaacctcctggtaaaaagaaccgctacccaagggatacacatcgtgcgcctgaccaacagcgtgtactggaccacacagaccctgtgccagccgagacggatccaaagctctagtagcctgaggtctgtcaaggagggcctataactgttttctgggagaaaacaccgcatcgcctcgtcacacatcgctgcgccacacccaagcatcctcgctttcgtatcgacaatctacacattatcgcggcggtacgtgcaactgcttggcgatatctctaatcacagagctgttgccccagctcacgaggagatcgagttgccagttgcggtcgacttgacatcgcgtgttaacgctgcgcgccgtgaagccagtaggtcgtcgaactcacgaaccagtcgcgctggtcgtgctgcttcaactcgcggtggtcgtacagcttcaactcgcggtggtcgtacagcttcaactcgcggtggtcgtacagcttcaactcgcggtggtcgtaaagcttcaactcgaggtggcagggcaacttcaactcgtggtggcagggcagcttcaactcgtggtggcagggcagcttcaactcgtggtggcagggcaacttcaactcgcggtggcaggggtgatcatggaggtctagcatcgatgcgttcccaggaagcccaagtggatagaccaagtcggacggcccgggcagctagagtcgagcgacgtacaagccgggttacccgcagcatgactgacaattaacggttgacagcaggttgaaggccctgacacggtttgttttttatgcaatttcccctccaatacataatacatctaatttccgtttacgtatacaattatagagtttttaaaaaaccctgttttgttaggatcttttttaggtcccatttggaggctaattttttttcggtcctgttttggtcctacggaccaaaaagaccagacctgcataagacctgtttaaaaatcttccgccactcggccggcttgggcgattgacgtcgccagcattcgtatccatgacgaaaacacttcttcaacgctcggtgtggatcaaaacgttgccgatgatattgtcgctaagttgaccactgttcggtggacggagcacgctagcactgctacatggagtactcatgctacgtgtaacgagtcttttcaacgccaaacgtagtttgagctcggttggctgtgctaccctgcgaattgataggatgacgggacgtgaactaaacatcatgtgaaaccattggcgggaacccgggttcccgaaaatgataccgaccaaatcgcgaattatttatttaattttcggcaccatattggtaccgttggggcaagttaaaccatcaaactcgatgaaagagttcccactaatctgtcaccggtactgagtagacctgaataacgtaccttaccatgtcaaagtccaccttacgtgagcaggaggatagcaatgtggccggaaagccctctaccgctgtaccaggcaagagtctggattttcatgagagacacaggacgggagcaaagacgaattcaccttccgtttctctaccgagcttaagctacgttcaacgtaggtcatagaacaacactccaattcatttgatcatacatgggtaccggtagttttggggaaaccggggtcccgatgggtacccgggttcccgccaattgtttcatgtggtaaacttgtgcttgagatcagcgtctgtattgagtcgtatctaccgtaccccacaattttccgcaaccaataaggtgcaacgcaatgcaatcttgtggggtacctcctcagctcattttcgcgctaattttcctgaaaaaggccaaaccagaatacaaagacactgtcatggaccctatcgatactgtctgaagcgttcttaaagactacaagtctatggaaaattcaccatgacgacttgatactaagaaactctagtaaaattaaacgagatcactttgatctactactactaacttgagccggatacaagttgcctcgcgtgcttgttcacaccacccgtcgatcgttaaacgtctcagtctgccgagtcaccagaaacttgcttcagggcaaaaaggatttactttgccaactactcaccgataaatgaaattatttagtttttgtcgactgccagtgtttaaccttcgtcccctcgatgccgaccacagctcacgaaataaagggatctcaacgagttgtttagcggttgcaccaacggatccgttaaaaaaagtgatgaggaatctccgtgtatcacacggcatctcttttacgcatgcccctctcaagaatgtatagttgccccgccgaagcaaggttctcgtcttgaaaccaaggactgaagaagcgccacagtacttaagtagttctttgcgacgagtatctgtatcagtaaagacacggaatcatttgcaaggctatcgcgagaggtctacaacgtgtcatgtcggagattgtttgctctcagaagttcgccgacgctcggtccagcctctggtctcgttgctgccgataactctgcagtcccaagtcaaagtaactagcatctatcggtcaacttgacctgctctcatattcaccagcgaactgatttggcgcggttggacttcccccaattcttgcgagacgacaaatcgaagctttcggtagtcaatcctgcttcaagtacgatgagtcaccagaacgaccaaatgctggccgcgtttccacgcgcgcgttcgcccagctctacggtatagtcaagtatacacctttgccaatccaagttggcagcagtgtaaagcaaaacggtgtgaagtaacttaagtaacatccaaaaatcggaaaataatttctgaaattagtatttagagcaatgtggatttagtgcagagcaaactcaaatcactggtcagtaacagactatctccgccggcaacatgccccaagagccgaagcatcgccgaagtagtcttaagaaagccggagtatcgggttgcttcttcgtgacaggatccgagactcgccgaatttcactcatgaggatgtcgaagcttggtgaattgcggaggctgatgccggcgtgcgcccggtgtacccaccggattgctgcaagtttgagtcggatggtatcgtattgattcccggcgccattccatccgtaacgccaacagaatatagcgaacatgctgagcttgctgtctgaatcgtttgtgtccccgccaagccatggagaccacgtcatgaatcgtgagaattgcacccactgcttccagtatccttgatatttggcagaggtagtgccagcgagggcatgttggcgcagcaccattcccagagacgtgagagatcgtcgtagggcgccactactggtacctgcgtccagccagatggcaagttagtccacgtatcgaagtgttgatctgctcggggccaggctcgtgagccggcgtccgccatgatgttgtcggctccggggatgtgggcggcggtgcacacgagcgagtagttgaattccgccagggacagaagtcgattgttcagctgcgcgaggggttgtcggcttgctcggcgttgagtccacgagacagcgcttgtattgtcgatccagaaacgcacttgtgtcggtcgatgtgctgacgagcgaccccatgtaggaccccagagtagagctgcgagtactgcactgtggagctcgcggacattaatcgaattggctgattggtccgctagaaacagttcctggtcagcttgggtgaactgtactcggatgaattgcttgagcgctggttccaacacacagagcccttgattggatgcgtccatgaagacgtttacggtgggttcgtcgagacgggcgaattgtttgacacggacacggttgcagcggctgctgtggtgaagaatcaatcgaaaccacttcaggtcttcgactgcctgggtggggagcttgcggcgccctgctcggcccagtgcgacgcccacaccttgcaagcgctggtaaaaggcgcgcgccggaggacagcatgtggagatgtgacgcaggcaccataagaggttaagcgcaaaggttttggcaaatcggacgtgtaaaacagctacctactaagatggggctaggttatcggagcagattagcaggtccctcgtagggaattaggaccaagaattgctagtccgatggaagcacttgcgcaggtcctacaaacagtcgaaagcccgaatgtcgcccattttcacggcattcgggatttggagtcttacgaaggactcctgtcaagtcttgtgacaggactttcatacgagctgactctaatacggtgtatgtcaaacgcagaataaacttagggaaacacgatgcagtcgatacgttaaacactccagtcttcgcccttcaccttcgcgggttccggtattgcttgcttccctaaacaaagcttgcttggcttggactccaaccggagtccattgaacggaagactccaggagaccactcatcgaacttgtccgagatttgcatctccgatttagagaccgccaacctcagattaactgacctccaaagtcctacgcaggactcggcaaaatgaccgaaaggcacaatacaggcacgtggcgaaaagctccagcgacgtcaccgagcatcataagtattcgcgcgaacggggggtcttgccgaagcgaaaagattctcctggtgatgtcaccaggagggttgtacgagatttccggcaggtgagttcggtcagtaaaatcgtttacagattcgccttgcgggaaagagtagtcgtttatcaggcgaatatcgggcggactcgtgccggccttggccaccacaccgagaggggagatgaacacttccttccattgctccgctagcgaggctcgcacaacgagataccgtccttctttttgacccttgcggatatgacgccatacattcgggaggtggtcgctgagagagccgtggttcggaggccgctggctcttgagtgtaggtcgctgggggagccactcaggcactacgccgtgacggaccacatcgttccagcggctccaggttgtccgcaggtgcggcgctgggggtcgtgggagttcgtagagatccttgttggggcgcgggtcgtctgctgtctggcctcggacgagtcgtatgaaatcagccaggtgcatgcgtgattttactgcgagatcggagagcatgttcaccattccgacgtcaacgctgtcatcactgggcgattcggacgacaggggtacgggaatcttgtacgccgctgccacagttgcaaggtggttcgcgatctcagcttgacaatgtacgcgtagatcctccaaagtcttcatgtatttattgtgggcagcagataactgttgacgagtggtcgtgtccgacacaaaactctcaggtgttagttcgtgccgtgctgccgtggtcacggttggagggtcggggcgtgcaaggcgcgctgagacccgaggctgtcactggtcggcaacgtcgggggcgagtccaccgaagcgctgctcgatgtactctttcacgttggccggtagcattttggggcggaagtgcgcgcgtttagctgagaagcacttgccgggcacaccgttgcctgagcaatcagcacgagagagatatttcatgcacaattgaagagaaccttgtttcggcagattgcgcagcaccaccttgggaaccccgctctgcttctcggggcgggagtcacgaccgcttgcacgtccggtgagggcgacgggtgatctcgcgtccagttgcgctagcaggtcggcgatttttgcctgttgttgttcgtacagtagtttggctaggagcgggtcgtgcagggaaaactcgcttttgacgcagaccgctgctcctatccccccggaaagaaccagtcctcgaaacttgccgagcttcatgttgagccataacaaaatccggcgagtcgtgtcaatgtcgggctcgccaccgtcaccgaatgcttcaacaaagactgcggcggcgtcgagcacgtccacagttgtcgcgttgtagaaagttcgaccgaattgacgaaggttgcggagggagtcgattagctccgagtaggacagggaactgggcgtcgctggcaggcagttcttacgggagaagtcactcatgttcacgaccgctgtcgtgtcattcaacatcatctttgctgtgtattgcgcgaagtgagccaccgatagtccccggacatggaatccaaagtcgtaagcgccacgtagcaccggaggggttcggcgaaagttgacatcacgagcctgttgagcatattcaagcacacattgggcgtccttacctttgttgtccggatgggtgattgcgtcgtgaacctgctgctcgtaggttgtcggtcggaacgtagtggtcgagcgtctgcgggcgtcatcggtggcgtccagcatagtggacgacatgtcgccctgaccagcagccaggcgactgaacgtgaggggccggttttgaagtagtacagcttgaaggtcgtcgtcgtccactgcggtgggcgggaccgactcctcgatgtcggactcgtcgcttgcaagctcgtgcagttcttgtgcgatcttctgacgggtagcctgtcgtgtggcgggaggcgatatcgcccttcgcttattgcgttgtgccggcacctggccgccgtcttggttgggcggcggcacaaacatagacatcccttactttgctttcttccggagggcgcagtcgatgacgtgctctcggggcaccgacacgagctccagcgtatctggtcgaatggcgttcacgcatgcggacggctcgtacggggtcgagagggagtacttcaccttggctggcacatcgcggttcctgttgcatgacgccagtcttccgtccatgatttcgaccagttcgactgcgtggacgaccgcagcgtttttgccggcgctgggatggagtgcgtagttgatccagtccaccttgatggcattggacatctgctggatggctaccttgcaggtaccgttggcgtgtcgaacgtgaagccagccctccgcgccgaccatgcgataacccgtgacgaggccaaagtcccactgatccatggtgggtccgtcgggctggataaaggcaattggatggccgacgtaggtgccgggccacagcgcacgctcctcatcagagacaaggcggcgttttagcaccttgacgccgatttcctcgccgaggtcttcgtcgtcttcatcgtcggcgtcaaggtcaatgggcgcgaccgtggccacttctccatccaggtttatcacgcgcacgtagcggaactcggtcagagcgttaacgtgggcgggaccgacgaacgcgacagagccaacagcaaccgtagcctcgcgcattcgtcagcgggtagtcgagagtgatgaagttggtattagcttcgagcgagcgatgaaaatcgaaagtaagaagcctctcggtcggaacgctacctacctagtgtagtctgcgtacttcgattcgtcggtgggcgatcgtgctccatcagtcaaggtcggatacttgccgtctggaaaccctgacatccatcctggatatctctcgatgacccgtcggaggtgcatcgtgtccaatgatcgtggcttcgaggccgtcttcgcgctcatcctgagtaagatccatgtgcttattgacttcaactaatgttggctgaccgaacagtatgacgtcaaatggagttaattcaattcgaggtacacgtacagtggaatcctcatctacgagctctgctatgaaggacttggtatcacaacaggacgtgaaaatgagctagctattgcattcacgtgaaatgtattgagatatgaagcgtgatggctcaaaggtgaggctgatttttaccgtgtcagttacatttgaaacggatcgaaaaaatacccgacttcctcgatcagctttttgagttcccaaactctgtggagtattgatgagatgagtgactgttcactgctacgcgtgcgaaggcgttttcactgcctggtcctcaggcccgcgtggacagcgttgcttgatattaaactgctggagttgcacaatggctccagttgaagtcttcgctgccgtgctatgggaagcggcggggtctgagtaagacggatggagtacagtaagcttcactgttttgtcttcaatccgccttccagtgttcaaggcgcgatccacggatccctgttcgagagctgttgacaagttgcccgggcaccggcgaagccgtatcttgagctaaggaagggttgtatactgttcatcttcacttcacgttgtgttccagctcataactgtgggatcgacacaatcactcgttacagcagtctttcagcccagtgattgccacctccaagtcatcgctcgcacttgatccacgactcgacatactacagccccaattcttcacggccctggcatttcggtgcaaatcaggtgctgaaatcgataggctaccagatcagcgccgagtttttcggtcctcgtaaaatcgacagaaagtaggaactgcccgtacaggaacaggaagcagcgcaaatagttttgagcgttctaagagcatccggaattcaatttggaaccagcactcttgcatcttacaggtacatgtacaacctcacctggctgtattggaggtactattggaaatggcgtaacaatactgtttatacgattcaatacctaaaatttacatgtaccatgaagtgaaagtctcttgcggtggtcgtcaggcgattgccacgatttcattatcaaaagtgtgtgcacaatacttgatccccctcgttccaatgctgcaaaggcagcgcgctccccgtcggaattcgccttgagccgtgtagtacatgtacatcgatcggcgagctgagtcaactgagagacgacggtccgaacacttgcgtcgatgggctaccgcagcttcaagtgtagctttgagtcacaccattttcaccagccaggctgcgtttccacgcgcgcgttgactttgtgtggggcagctccatagtaaagcctcgtgtgttgttatcagcccctcgatagtcaccgtgccggactgttagacaactcccaagtaccacgtcgagctgagtcggagtgcaccgaggcccatgactcggtgtttagtgcccgggaattttaatttcaaggccctttcctccacggcactagcctcgtcgactactgtcgtgccgtgcgaagcggcccaagcgggtcttcaagatcacaagtgtattcggccgagaaaggaagaagaagatgaacaacacgaggtctctccacgatgaagtcaaagctacaagcacagcacttaccaattcgcctccaatcgattagtgaaccaccaaacaaacaatgaaccattctgctcgcatcatgatcaaccagcccacggctgcctacggaggcaacagcaagaacaccacgcgcctcgaagaagaacgggtcgagtaccgaccgacctttgcgtctcgcgtggccaagttgatcttccgacagcgtcgatccgctggagagctgcgggccaagtcctggccagggcgtgaaaaccctgttccaatcacggttcctgttgcacgagtcaccccgacgagtgctgtgcgtcaacccagtgccagcatcgccatccccaacagcctcggctcgtcagcatcggcctctgtgccacgcactcgatctatgcgcatacccaagcgaccaagaatccacgccagctccagtgaagccgagtggcgacatcgacaagctcactgcgcgaactgcgagcggttgttcttcaagtcgatgtcgactctcggtcgattctgttcgctggactgcaaggccaacttcgagtacttggacctcctccaggagacggtggacgtggagttcgacagcatcagcagcgactcgctcggttggagtttggaaggagacgacggcagctagtattttcggcaaacttatatcgtgtcgtgtcattgcttcgtcttctgtactggtcgtttattgtgtgatttaggataatagcaagaaaattttagtgtaattgtcgaaagtaaaaaacgacatcaaatctgaggatttgcatcaagttttaattttttttacagttttgtgattggtcaaagacgcagtagctttttgttttgcatgccttggcttgggtcctaaatgacacgcgaagttgcatgcaagaatggctgccgctaaatgatttactgtagcacgtcaaacaagacacgtaagataatagtgcgatcgagataaccggtaagctggtcgcgatagcaactgagtttattaaacttgaggacacatgcgaatacgctacagtagttttaattttaaagaaataatacaaactgtagaaaaactggttcttacagtacacaaagcaaaagcggcattcagttttacctcagtcttaccgcccaaaccctgcgggacggtgctaatgagattaacaactaacgttagatgattgattatggctgttctctgctatacgtacgcgtgagaaggtgttttactgcctgatcccaattggggatcccagcgattgcttgaagttgtctcacagcgttgctgcatactacagtaatattaaaccgctggagttgcacaattgcatataattgcactcgaattggagtcttcactgccgtgctatgagaagcggcggagtctgagtaagacactgggatacgataaaaacagcgtcattgttcactcttcaattcgcctttcagtactcggggaacgatccccggattcctgttcgagatctcgcccgggtaccgatcgatcaagccgtatactaagctgagagaagggttgcctacggttcaccttcgtttcatatgtgtgttccagctcacagccaccccgacgaagtcatcactcaaatctgatccacgacacgacggactccagctccggctcttcacggccctggtgacttggtgcaaatggggttgctgaatgcgatttcagcgctgaattcgtggatcctcctcaccgtaaagtggacagaaactctagcgacgcggcggtgcgaggctgaaggaagtaggtgctgctcgtgcagggcattgctacccatatacccatagttcagctaggtaagtgttgttttggcgttttaagagtttctgaagtccaatctggaatcagcactgctgcttttgttgctctttctcaagaacgcgttcgtgtccgctcgcggttgccgcatccacagtttttttcttcgtgttgtactgccgctgctgtactctagtcattaactacagtgaagtgaaagctctttcagtagtcgtcaggcgaatggcacgatttagtcgattcctagacgcggcaaggcctcatcaattacacagaagtgtgcacgcaatacacatacagtacgtgcattgcccccagtcccaatgctacaaaggtagcgcgcgcccgccggaattcgtttggagtcgtgtatgtactgtatagaccggcgacgacaatcgggtcacttgtagtacaagttgtaggatggtctaccacagcttcatgtgtactgggacgccttccaaaaacggacataactcgacatagaatctaaatttgtctctaaatatcaaatgcgcagaggtcgaaatgtgtgagaggtcgcctgatatatgcgtcagttgctagaaaaagtacatccctaatgaaatcaagtcaaatctaataccgtttactcagacgtaaaaatcgtctgagtaaatataagttttcttaaatttgaatttgttgggtgacttgttcgtttttggtaggcgtccactgtccttttgagtcgccaccatttcacaacgagtctgcgtttccacgcgcgcgttgctcttgggacagctccatagtgaagcctcgtgttattatcagcccctcgatagtcactgctagacaactcccaagtgccacgtcgagcgtgaaccgaccccatggctcggtgtttattagtgaccggtacttttaatttcaaggtcctttcctccccagtattttccttgtcaactacagtactgtgtactgtcgtgccgtgcgatgcggcccaagcgaattcagtcgaggtcgccattatggagccaaggttttcaccagagcacttctcaattcgccaccaaacagacaatgaacacctcagctcgaatcatgatcagccagcccacggctgcctatggaggcaacaacaagagcaccacgcgcctggatgatgaaccagtcggacgtcgaccgagctttgcggctctcgtggccaagctcatctttcgacgcggccgatcctctgcagaattgcgggccaaatcctggccaggacgtgaagaatctgtcccagttactgtgcctgggtctgtagccattccgacgacccctgctcggctgccaagtgccagcatcgttatccccaacagcatcagctcgtcaacaccggcctccttgctacgcactcgatctatgcgcatacccaagcgaccaagaatccacaccagctgcagtgaagccgcgtggcggcaccgacaagctcactgcgcgaactgcgagcggttgttctccaagtcgatgtcgtctctcgtgagcagcgctggtcgattctgttcgttggactgcaaggccaactttgagtacgtgagcgtcctccaggaggcgatggacgtggaattcgacagcatcagcagcgggttgctcggttcgagcatggaaggagacaacgccaactagagcctctcaccttgacctttcagccttaccagcgttctttgcgggtattgtagtggttccgtagtttaacacgttagaacaataatgaagactagaacatgtagtgcagtgtatgtaaagactgcagcaagaggagaactgtgtcaatcgaatcgttgctgtggacgaaagtaaacagcaaacatgacaaaccgaggctttgctaccaacttcaaccttttacggcttgtgattggtccatacgaaataccgtgaacttcgagttgatgcctccgagtgcctgctgcaggactcggtggggacaattgcgctatggatttctcatttcggtggctgcgcatgggtggaacagaatacgcgcgtgcctgcctgatccgtggtaaggtaagggcgccgctgcgcgaagcacaacggcgcccgatcaccggaaggagcaaagcaaccagaccggacgctgctgttgccaacgcgcagcgagacagggaatgcattgtaacgacaaagcgctcggatcgacgaacttcagcgtttattatatatgcgaatgcatgtacatgcatgcagtgcacgcgaacgaaaggagcatcggtttgcacctcgactagcggatcgacaaatgcatcgcgcgtacagagcgctctgctttgcgtcctgtatacatgccgtcgatgtaagaacgcttattgcttcaacgtccaacaggcactgccggtctcctggtgacaactgtacatggacacgtagtacagtaagatgaaagctctatagctacgtaggtggctgagggccatagtggcctataacaatccactatgtcatcgcccccaatactgctgcgatgtatacagtaatgtgcgtcaataaggaacgtgtaggaactaatttccttgtacatataataaacagctgggtgggaggagccctgtttcctgctaatagtaatgatttagataaaccattgattggggttgactgggaagtaaaccatctaatacttgttttatacactaatccagtacatgcaaccggctttgttacactgtttggtccaatagcctccttgcttctacccatcagcggttccttattgacgcacattactgtatccaacgtgctcggcctccagtgctggaccagcgcgccaagcaagcaagcacatgcggagggttctgtccgcggattagtcttgctacgcctacagcaacagctgttttattttgtgcttgcaccaccggcaaggttgtccaattggattagaccggtatttcaatgttaagggttgtaatacaagcgttcgttattactctcgagtatgtgtaccacttattaagtttacagaggtttctgaaaatcctgacggagacccgattcgcaagcttgaagtgtcggcattccgccgtctcacccaccacgcctgaccggtcaggcgagtattcatcgggcaccgatgccgcataaatgccgcgccgcagtccagtggtctcgccgcctccgcttccggccaaaacctcagtccattcccgaattgacccgcgtccgcacaagtcgacccaagccttccaagctcgcataccagccagccatgcacaagtccgcgcacgacttcaacgaggccaagcgccagaaagacatcatctcctgggacgcctacaccagcggcctcaaggccggcgcctgggccagtctggctatgggcgcggccgtctacggcgccaacgcgtaccacagcggcttccgcacgcgcctcggtgtgagcggcaagtgggcgctcgtggtctcggcctacctggccgggttcgccatcgtggccgagaatcgactcctggccggggcccggaacccggaccagtacatggctacactcgaccccaacttcgtcgaggtccgcatgatgaagagccaactgccgctgcacaaacgagcggccaacttcgtgtacgaccacccgtaccacagcctcgtgacgttgggggttccgctggtgggcggcatcttcgcgctgcaggccacgaacaagagcatcaaccgctcgcagcagatcatgcacacgcgcatctacggccaggcggccgtggtggcgctgctgctcggctccatggccttccacgactacatggccaagcgcggccgcttcgaggaggacgaggaggacgaggcccacgtgcccaagatccaggagctcaaggcctagtggacctcctcaccggtatttctctccactggtttagtttttagtagtatcctaggacgtggggcttgttacgagcccctcagcagaaaccattgcaaacgacaggcaacatcacacggaggctggcagctcagacgtcacgatgaacacgacagaccgaagcaaaagaaatacatgtccacattgaaaaaaaaacacacacacacaatactgaatctatcgtttctgctcgagagcccaagtccatccgctctgcatgtagctcacaccgaccaagcagagaaggcgaaccaacgacaaccatacatcgcgcggtgaggagacagagtgtccagcgaatattcttatgcttatttttttacttttttcatgttggtgacgcaagaccatgcgcttgtcttgctttcggtgaaatgaccatctcgataagattctggtcgcggagaggactgatagacgacaaagcttttggcagccaccaggccgtgagtaaagtaagtgatgttcacggtgtgcaggcaccatttggttcacggcattgggcatgtgaggcacgtgaggcatgtggcgcaatgatcgatggggccgacacttgaagtgtggctgtgaggctgttgcggggttaattggacctgtcacgcccaacaccgaaatgcccagtcgctgtcttcttgtcgcgtcgctggccccctgctgtcgccgcgttgcgcatgtgcctgacttgcaattggtctctttcgtgccccatccggcagatgatcagcagcttgatcagccgtggcacggcgttgatcggtcgctgcgtgatctcctctacggtcaatggaaaggcggctgggtggcacctccctccctcttcatgatacaccgaggtggccggccggccaccgtccgatcgacgcaagtctcactttgcagcttgccatggcgtcgccagcagcgccctacgccgtaatgcccgagatgtcgccgccgatcctcgagcgatcgatgctcgagagcggctacacgcgcgagagcgggcggaccgtgcccaatggcacgtcagactattcgagcgacagtctccaccgccgctgcattgcggccaagtacgaggagttcatgaacccgtgcgtgctgagctggaccgacctgagctacgcggtgcccggcaagaagacggccaagaacccgtacggcaagaagaccatcctccacaaggtgagcggccgcagcgctccgggcgagctcacggccatcatgggcccgtccggctcgggcaagaccacgctcgtggacttgctggccgaccgccttagcaccggccaaatgacgggcaccatcgagttgaacggctccgagcgcgtaaccaagacgttccgggccgtgaccagctacgtggcccaagaagacacgctgctcgggtcgttcacagtagtggagaccatgaacatggcggcccgcctcagtctgcccaacagcgtggtgatgacggacatccactcgcgagtggagagcgtcatggacgccatgggtctcggcgcgtgcaggaacacactggtgggcgatatcttccgcaagggcctgtcaggtggccagaagcggcggcttagcattgccatagagctgctgtccaacccgagcatcctcatcctcgacgaacctaccagtggcctggactcgagctcggcccacaatgtcatgaagtacattctcaagctctgcggcgaaggcaagaacgtagtgtgcacgatccaccagccgtcctcgctggtctacgacatgttcacgaacgtggtcctgttgtctggaggcgagaccgtgtactacgggtctcgcacctacatgatcccgcacttctcgggcgtcggcttcaactgccccaagtacatgaacccggccgagtactttgtcaacctcgtgaacacggacttcgaagaccacgtcgacatcaccaaactcgtccacgcctacaagcagagcacggtcaagaagctgctcctggaccaactagcagcggaccgaacaacgctgcaacatttaccagacatcgagctccaaccttcgtccgcgatgcggcagttcagcgtgctcatgtaccgcaacttggtgaacaacatccgcaacccgggcatctactggatcagactcttcatgtacttctgcctcagcttcatggtcggcaccatgtacctgagcagcaacgatgatctcaccgaggaagacctgatccccatgctgttctacgtgcaggcgttcctggtgttcatgtcggtggccgtgctgcccttcttcatcgagcagcgcgccgtgttcgcccgtgagcgcgccaacagctcgctgagcgtcgtgagctacgtgtgcgccaactttttggccacactgccgggcatcttcctcatcgtggtcatgtcgacggcgctggtggtgctgctggcggggctcaacgcgttcgagtacttcttgctcaacctgttcctgtcgctcgtggtggccgagtccatgatgcacgtgatcggcgccgcggtgccgcactacatcatcggcatcgcgctgggcgcgggcgtgttcggcatgttcatgctgtgcgagggcttcatggtgccgcgcgactcgatcccggactactggatctggggctactacctggcgttccactcgtactcgttcgagtcgttcgtgttcaagcagttcgagaacgagacgtccgatgaggcgagggccattctcaagaagtacggcatggaggacgtggacgtcccgaaggacatgctctacctcgtgggctacattgccgtcttccagctcatctttatgttcatcctgtggaagttccacactggtcgtcgctgagtttctcgtgagtgagagtgaatcaacaaaataaactacgctaatgtatcattgtactatgaacaagtggatcaatcgtcttgtcttgagatgtcggcggaaggccgtccgcacgcgagggcgcgcatgtaaaggtccccccccccggccacagcacgcgatctgcgcctgaccgttgccgcctcaatgttcagcagcggaatgggaggtcaacatcctgaccgttgtcggctcccgcgcaatgctgcacacgacggcgtacccatgaggctcgtcaatgtgcgcgcgcttcaagctcgtcgacagaaaaggcgaatgactccacctcatgcgctgcctgctgccgggtgagacggtgaagacacacacgaccgaggccggcccgcgtgctgaccctcagtccctcgtggtggatagcccagtactgcagagcaaccagcacgacgacctacctaagccctccccatgcatcccatccgatcccgaggtcatttgggaattcacctcgctgctgccaatggcgtcaccactctcccctacgagttacgccattcttgaaagcgatcacagccaggaaagcggccacacgggggcggtcgtggccactccgatcgagaagcctcgagctggccggatgatcaaccaagagatcgaggtcaagtacgaggccattcggaacccgtgcgtgctgagctggagcgacttgagctacaccgtcaagggcaagaaggcgccggagctgccatggggcaccaagaccatcctggaccgagtcagtggccgctgcgcgcccggcgagctcacggccatcatgggcccgtcgggttcgggtaagaccacgctcgtggacttgctggccgaccgcatcagctcgggcgacgtggccggcctgatcgaagtgaacggcacgcagcgaaacacgaaaactttccgggccgtgacgagctacgtcgctcaggaggacacgctgctggggtccttcatagtggtggagaccatgaggatggcggccaagctcaatctgcccaacaccgtcacgtcgcacgaaatcgagatccgcgtcgagaacgtcatggacgccatgggcctcgggactgcccgcgacacactggtcggagacatcttccgcaaggggctgtcgggtggccagaagcgccgacttagcatcgccatcgagctgctgtcgaacccgagcattctcatcttggacgagcccacgagcggcctggactccagtgcagctcacaacgtcatgaagttcatcgtgaagctctgcgaagagggcaagaccgtcgtgtgcacgatccaccagccgtcgtcgctggtctacgagatgttcacgaatgtgatcgtgctctcggccggccaaacggtgtactgcgggcctcgggccacgatgatcccgtacttcgcctcaacaggctacgactgtccgcagtacatgaacccggccgagtacttcatcagtttggtcaacacagactttgaagatcatgctgaagtgcccaagctcgtctacgcctactccaagagcgacgtgaacaagcagatccaggacagaatcaaccgagaccgatctacactcaaacacttgcccgatattcgcaagcgtcctccttcggcgctgcgccagttcggcgtgctcatgtaccgcaacacgctgaacaacatccgcaacccgggcatctactggatcagactcttcatgtacttctgcctcagcttcatggtcggcaccatgtacctgagcagcaacgatgatctcaccgaggaagacctgatccccatgctgttctacgtgcaggcgttcctggtgttcatgtcggtggccgtgctgcccttcttcatcgagcagcgcgccgtgttcgcccgtgagcgcgccaacagctcgctgagcgtcgtgagctacgtgtgcgccaactttttggccacactgccgggcatcttcctcatcgcggtcatgtcgacggcgctggtggtgctgctggcggggctcaacgcgttcgagtacttcttgctcaacctgttcctatcgctcgtggtggccgagtccatgatgcacgtgatcggcgccgcggtgccgcactacatcatcggcatcgcgctgggcgcgggcgtgttcggcatgttcatgctgtgcgagggcttcatggtgccgcgcgactcgatcccggactactggatctggggctactacctggcgttccactcgtactcgttcgagtcgttcgtgttcaagcagttcgagaacgagacatcggaggaggccaaggggattctgaccaagtacggcatggagaacgtggacgtatcaaggaacatgttgctgctgattgtgtatattgtgggtttccaggccatcttcgccttcatcctgtggaagttccacacgggccgtcgctgaatctgcgaagcttcattaagtttttcgagaaaattgagttggtatataatctttttcgcgtcgacaactcgtacagtatgcgggtgcctttgtcaaggtgactatcctatgagggagccattttttgcggtggtgttagttacggctttcgccactcaaggatattagcacgggattgagcctttccaagaaggggctctcagtcgagtgcaagtgcaaatcgatcgagtctgtcgaagtgacctccgtggcgttgcggctactacacgtaacgcattgatttgacggcgtgctagtgcccgaccgccgggctgtcgagctgcaggactcacagcaacgattccttcagttttatcgatcaattcataaatggtgaatctgaattgtattaacatttatgcgtacggctctgcatatctgaccaatcacaagccgtaaaaggttgaagtggttgcaaatcctcacgatttccggcatcgtacgtacgacagcaattgaatcggcacatttctcttcttgctacatgtgctagtttttattagtgtcctaacataccacacaaccacgaaactaaagtaaacgtccaaaatgaacgcgcgggtgacagcacgagaagctctagctgtcgtcgtctccttccaaacttgaatcaaacgatccgcagctggtacaatcgagccccgcgtccatcgtctcctggaggaggtccaagtactcgaagttggccttgcagtccagcgaacagaatcgaccgagagtcgacatcgacttgaagaacagacgctcgcagtttgcgcagtgggtctgtcgatgtcgccactcggcttcactggagctggcgtggattcttggtcgcttgggtatgcgcatagatcgagtgcgtggcacagaggccgatgctgacgagccgaggctgttggggatggcgatgctggcactgggttgacgcacagcactcgtcggggtgactcgtgcaacaggaaccgtgattggaacagggtcttcacgccctggccaggacttggcccgcagctctccagcggatcgacgctgtcggaagatcaacttggccacgcgagacgcaaaggtcggtcggtactcgacccgttcttcttcgaggcgcgtggtgttcttgctgttgcctccgtaggcagccgtgggctggttgatcatgatgcgagcagaatggttcattgtttgtttggtggttcactaatcgattggaggcgaattggtaagtgctgtgcttgtagctttgacttcatcgtggagagacctcgtgttgttcatcttcttcttcctttctcggccgaatacacttgtgatcttgaagacccgcttgggccgcttcgcacggcacgacagtagtcgacgaggctagtgccgtggaggaaagggccttgaaattaaaattcccgggcacgaaacaccgagtcatgggcctcggtgcactccaactcagctcgacgtggtacttgggagttgtctaacagtccggcacggtgactatcgaggggctgataacaacacacgaggctttactatggagctgccccacacaagatcaacgcgcgcgtggaaacgcagcctggctggtgaaaatggtgtgactcaaagctacacttgaaactgcggtagcccatcgacgcaagtgttcggatcgtcgtctctcagttgccgatcgatgtactacacgaccaagggccttgagtcgtgtagtacaggcgaattccggcgggagcgcgctgcctttgcagcattgggaggagggcaatacctgtattgcgcacacacttctgataacgaaaccgtgacaatcgcctgacgaccaccgagagagtagatttagttgatacctacaaaccgtattgttacgccgtctttcaaatactacatgtgcagccaggttatgttgtagaaagtaagatgtggcaatcgcgagcgggtatgaggtatacacttagaacgctctaaactgtttgcattcctgataactacagtgcctaaagactgtaggctacagtaattagtctggcttcaaaattagtctgggccagactaattcgtgtcgaccaaaaattgacgtcttcattattagtctggctaaaaatgctcataattagtctgtcgtggtgaccacgattctagtccaccccacctactttaaggcaccgcttgctgaaaaactcccttgacagcagccaatttactagatctcgtacaatatctgcaatatataatagatacctgggtatccaacccatatatcagccttctctaaccatttgagaagcagcatctgcgatgatttagtgtttatttcttatcaaagccacgataaaatatagctacagtttaaaatactaaaacaaatacgtataaacacatcatttcacaaaaataatggtttcttacttgtactggaaaacgagcattttagatcttcataattagtctgtcactgttggggccagactaataattgtgagcgatgaaaaatctggtattcagatttagtctgggccagactaattactgtaggtattgtacctgaattatgggaactctacttcctgtagcctaccttcagtgcgtcacccagcttactatcgactctacagtgtagaatctacagtattgttctgttgcatcccccgtcccagtgttggcacgagccgcctcccatgccacgacagccaaaagcaacagtcgctctggcccccagagcgaagaagagtgcaatgtatcaacgctgacatcgagcaacgcacgcgtcgcaacgctgtccacgccgagctgatgactcgagaagcacttgaagctgggtaccggattgtcgcctcgcaagtatttgggcaccatctgaagtctcagctgagcattgggaccaggcattgagcacttttcgcacccgtaggagaacgatcactcatcaatgcaaagtcggctcatctaatcaagttccgaaaggcggggctatagcgcggttaagaagttgtgcttgatggcctgctttatcgactcacctacattgggaatgttggcatacaattttgccaaacgttcttacggcgccaagcacctctagggcagtctctgcggttctcagagcgacccgggggtgctttgtagtaatctcagatttggtcgaactacatttataaactggtaatcctagatttggtcgatctaaaaaagggtacacaaatttagtaagcaatctgtaaagtcacaatttaagaaattggacgtattttataaacacaaatatattagataatcaatatctaagtcgttcgaaaagactaagtgagtattttgattcaaagcgtccttattaaggacgttctaaatcaaatacaaatgaaaacgaacagcacggacctttgaataccgagaactacttcgaggttccacctctcaagcacaactacatgtaatgtagagtagagaactattaatcccgagcgcaatagtatcacacgtattatattcgctgacttcatatattggcctgactacactagcattagccacttaacggcggcccgtgtggaacttccacaggatgaaggcgaagatggcctggaaagccacaacatacacgatcagcagcagcatgtcgcgcgtgacgtccacgttctccatgccgtacttggtcagaatccccttggcctcctccgacgtctcgttctcgaactgcttgaacacgaacgactcgaacgagtacgagtggaacgccaggtagtagccccagatccagtagtccgggatcgagtcgcgcggcaccatgaagccctcgcacagcatgaacatgccgaacacgcccgcgcccagcgcgatgccgatgatgtagtgcggcaccgcggcgccgatcacgtgcatcatggactcggccaccacgagcgacaggaataggttgagcaagaagtactcgaacgcgttgagccccgccagcagcaccaccagcgccgtcgacatgaccgcgatgaggaagatgcccggcagcgtggccaaaaagttggcgcacacgtagctcacgacgctcagcgagctgttggcgcgctcgcgggcgaacacggcgcgctgctcgatgaagaagggcagcacggccaccgacatgaacaccaggaacgcctgcacgtagaacagcagcggcaccaggtccgcgtccgtcaggtcgtcgttcgtgctcaggtacatggtgccgaccatgaagctgaggcagaagtacatgaacagccggatccagtagatacccgggttgcggatgttgttgagcgtgttgcggtacatgagcacgccgaactggcgcagcgacgacggcgacggctgctcgatgtcgggcaggtgctgcagcgtcttgcggtcgccctcgattttggcggccagctccttgcgggtctcgctctgcgcgtacgactgcaccagcttgggcacgtccgcgtggtcctcgaagtccgtgttgaccaagctgatgaagtactcggccgggttcatgtactgcggacagtcgtggccggtcgaggcgaagtgcgggatcatcttgacccgaggcccgcagtacaccgtttggccggccgagagcacgatcacattcgtgaacatgtcgtagaccagcgacgacggctggtggatcgtgcacacgatggtcttgccctcggcgcagagcttcacgatgaacttcatgacgttgtgcgtggcgctcgagtccaggccactcgtgggctcgtccaggatgaggatgctcgggttcgacagcagctcgacggcgatgctaagacggcgcttctggccgcccgacagccccttgcggaagatgtcgcccaccaacgtgtggcggcacgtggccagacccatggcctccaccacgtcgtccacgcgggcctcgatctgcttggacgtgacgctgttgggcaggctgagcttggcggccatgcgcatggtctccagcaccgtgaaggacccgagcagcgagtcctcctgggccacgtagctcgtcacggcgcggaacgtcttggtcacgcgggcctcgccgttgagctcgatgtcgcccgtgacgtctccggagctgatgcggtcggccagcaggtcgacgagcgtggtcttaccggagccggacgggcccatgatggccgtgagctcaccgggcgcgcagcggccgctgacatggtccaggatggtcttcttgccgtcgggcgcgtcggccgtcttgcggcaggccacagagtagctgaggttgttccagctgagcacgcacgggttggtgaggtgctggtaggtaggctcgggcttgccgcccgtctcgagcgcgtccagcgctgagtaaggtgtcgagtgtggggaggccatgacggaaatcgacggcttgcggtctgggtccagcacgaagaagcacaagctgttggccgtgctgccggtggaggagcggagacggtctcggtcgcactgcgcgagttggattgtgatggcccggggcggcgcggcaccggctgacagtcagtctgtcaagctgtcttgctgtcgatgcggcgcgaattgcggagtgtgcaaatcgatgccgggcatctcgcggaccctaaggccggcccggccgatcgctacgcctgactcgcctttcctgtcgacactgcggcgctgcagggacccggcggagaggtgcatggccgcagtcagtaacggtgccgctgatgaaagcgcgccttgcacagacgggggccaggtggtcaggcatgtggccgaagtcaggcacgccggcggcaccaccacccacgacgcggcgaggccgccgttgagcgcagggttggatgccagctctgccggacttttgccaaatgctggcactattgcaataatctagtcaaattatgattaccttcgacaaatgctggcactcgctgacaaaattatcagaaacaccttggaaaaaactgacagtttatgacagcgtcgctgcgctgtcgttaggggcgacatttccggttcattcccgttcaacacgctgcactatctagctcatggacaagttgctacgaaacggacagggacgctttcgagaagcgcggctggcgcagaaagcgcgtcgctggcccgcctgctcccgttcaagctccaaggaaggtcggtcggcccaatacgaacgcccctcgaacttgccgctactgtccgccgacaaatggcaacatgcgtcccagcacgcggccagtgacatcgggcactggttggaacgcaccactgatgagagttcttcggagctcgtggccgtcacactttaggggtgccgggatcgccactaaggcgcctagctataggacgagcggaatgagacgatcgtcgacaacgtcgtaggatgtcattagccaaagaagttaacagacaacaatgtacctcaatgcgaaacgaaacgaacttgccgctactgcaagaggacgttgaagacgccgcaagggctacgcaaccatttatttggctcacaagaaccgctgcgataaacggtcggtcgcggctcgtgctgaggcacgcacgtgagccggacttactagttctcgttattagctttcgtctgctttctctacggcttctctactgctcgtctatcttcctctgtccctcttggtcttgttatcctctatcctggtgtccattgcatcacgaacttgtagccatgtgctatcgctttaaggtaatatttaaaacattattgttgataaaattattaacttgacggtattgcggtatttactaatcgtttttggatagaatatgatcgtttctggcacattattatcaaaacctgaccatatatcatcgattttggatggattatcatcgcttcctgataaaatattgacttcatcaagaaaaatttaccagagcgaaattttgaagtgaaccaagttttattaaggaaactcgagcagtcataaactaatgcatggtgccaagactactcagacaccagagggaggcataatctcacagaccacaacagtgtaattgtaacccaaacgtgattcctgcggcaataccagcttttccgcggggtcctctctcgacatcttcgttcattttacgccacaatgtctactttgtaagtgaagcgagtgcgagcgctaagagtgcatgcgtctaataatacctgctcaggcctgatgcatccgtgtgcaaatgatagacttttattaggtgtttctgataattttgtcagcgagtgccagcttttgtcaaagtgccagcatttgtcgaaggtaatcataatttgactagattattgtaatagtgccagcatttggcaaaagtccagctctgcctgacttcagagccgacgagctatggacgcactgggtcaggcgctaaaacccaatggtagccacggttggctggcatcgctggccaacaccggaactgccgccgttgcagagcggagcccctcgtagatggatcgccacgtgccccagcaacgccagaccacccccgagtcagacataagatagcttggagatcagtgatctccagaccaccatggtcttctcgtcgtcgatggccgccaccaatgtaagctcggcgggccacacatgcggcggggccaactggtcgatcggtcacctctccgcgccacatccatcagctggtgcgagccagcagcatgatgtcttcagcttgaaggcgtcgtgcaccactaggtgctttcaaattcaaaccgccgtgactctgatggccgttcactgttcacagttcggtccgcgagttcacacatgatatctcgttcgagatccgagaaataaatttttgcacgatagctacgctacgcctgactcgacaagatccttcggctatccgagaaggtcaggcagagctgcttgtggcggcggaggcctctatcattctggatacatctggccgattgtcagccaaatccaaagcgaacactattgaactcgcttgtccgcaggcaggcagtcctgcaattgaacagcacaaactcgttttaaggtctagtgttcatattcatggcggccgtcctggagtcacctcgatctatgcgagggttatcgtacgccatgctggaatcgcttgaaaacggaaggaagcccgagcctacctaccagcacctcaccaacccgtgcgtgctcagctggaacaacctcagctactctgtggcctgccgcaagacggccgacgcgcccgacggcaagaagaccatcctggaccatgtcagcggccgctgcgcgcccggtgagctcacggccatcatgggcccgtccggctccggtaagaccacgctcgtcgacctgctggccgaccgcatcagctccggagacgtcacgggcgacatcgagctcaacggcgaggcccgcgtgaccaagacgttccgcgccgtgacgagctacgtggcccaggaggactcgctgctcgggtccttcacggtgctggagaccatgcgcatggccgccaagctcagcctgcccaacagcgtcacgtccaagcagatcgaggcccgcgtggacgacgtggtggaggccatgggtctggccacgtgccgccacacgttggtgggcgacatcttccgcaaggggctgtcgggcggccagaagcgccgtcttagcatcgccgtcgagctgctgtcgaacccgagcatcctcatcctggacgagcccacgagtggcctggactcgagcgccacgcacaacgtcatgaagttcatcgtgaagctctgcgccgagggcaagaccatcgtgtgcacgatccaccagccgtcgtcgctggtctacgacatgttcacgaatgtgatcgtgctctcggccggccaaacggtgtactgcgggcctcgggtcaagatgatcccgcacttcgcctcgaccggccacgactgtccgcagtacatgaacccggccgagtacttcatcagcttggtcaacacggacttcgaggaccacgcggacgtgcccaagctggtgcagtcgtacgcgcagagcgagacccgcaaggagctggccgccaaaatcgagggcgaccgcaagacgctgcagcacctgcccgacatcgagcagccgtcgccgtcgtcgctgcgccagttcggcgtgctcatgtaccgcaacacgctcaacaacatccgcaacccgggtatctactggatccggctgttcatgtacttctgcctcagcttcatggtcggcaccatgtacctgagcacgaacgacgacctgacggacgcggacctggtgccgctgctgttctacgtgcaggcgttcctggtgttcatgtcggtggccgtgctgcccttcttcatcgagcagcgcgccgtgttcgcccgcgagcgcgccaacagctcgctgagcgtcgtgagctacgtgtgcgccaactttttggccacgctgccgggcatcttcctcatcgcggtcatgtcgacggcgctggtggtgctgctggcggggctcaacgcgttcgagtacttcttgctcaacctattcctgtcgctcgtggtggccgagtccatgatgcacgtgatcggcgccgcggtgccgcactacatcatcggcatcgcgctgggcgcgggcgtgttcggcatgttcatgctgtgcgagggcttcatggtgccgcgcgactcgatcccggactactggatctggggctactacctggcgttccactcgtactcgttcgagtcgttcgtgttcaagcagttcgagaacgagacgtcggaggaggccaaggggattctgaccaagtacggcatggagaacgtggacgtcacgcgcgacatgctgctgctgatcgtgtatgttgtggctttccaggccatcttcgccttcatcctgtggaagttccacacaggccgacgctaagcaacaagttgaagtacctaagctaaatctcgagtaaaatatgtatgtatggtgctctacgctcttgaaagtgcttgataattaatactgcttgatagatctacatcaattgccgcggatcggcgattagtcatagttccgtggtatgaagatgaacatcaacccatttgtgtttcttggtgttctaaggcctgaccacttacagcgggttaactttctgggtgaagttgatggccaagtgccacgccttcttcaccgcctccttcgtggcagagtcttcgatgtcgccgcggcacacccagccgtggatcatgtcggggaagttcacgacgttgctcagctcagcgatgtcaggcttggccttgaggatctgctccacgacacctccctcgctcacgaggggagggtcgttgcccgccgcgcacagcaactggggcaccgagatcgcctccgtcatcttctgcagggcgccttcgccgttcacgagctgctcggccatccagctcgggtggaaggacacatggcccttgatcacgggcgtcgacagagccgactgcttcgcgccaacgtaggcgccccagcagtagccgtagctgctgatggactggacgccgacctcttcctgcaagtaggcgatggcgttggccacgtgggcgcccgcaaccttctcgaagctgttcttctgcagccaaccgggaacatcctggccctcgagggtctcaaggtagtcaccgtcagtagcacgacggcgtagccgagcttggccagagcttcggcgtcctgcttgatgcggctgctctccgggccgaagatgtcggggatggccaccacaccggccttggcctgggcagggcccgcaacgaagagcttggtgttcttgtaggtcttgggcacgatggcgttggcggcggtatccctggcgggctccatgacggcggggcagcaactcattttggcggaaggacttggggctcgaagaggaagagtttcgaagacagcaaaataggaaatgaccactgggaggcctggccactggagactttcggccggccgggctcacagcatgaaaaactgaggtaatcgccgtgatgacggggttgattgcgacagattgcacgaatcgctgatgtcggtcggaattggccccgatctctggtacattttggtgttgtacagggatgcgcccgactcacattacctgcctcgagctttgcaagagatatttgcagccatacataggttgatgaggaactgtacaggtcatcactgatgaccgctacatgaggttgggccaccccccagcaggacgtagtcgtggttgtcgacgcgatcgtcttgctggagatacacaaattgtgtgacggtattggcccgccaggaaccttgttgaagctgcttcggttcgaaagtcgagtgacgtgatcagcaccgctgatctgtaccagcaagcggccgagcctaccgcaggtgtaccggaggccccaacttcctgcgtgaatgtggctacacccaggactgcagtgagtaccgctgggcctgcaggtaggcgactgttgatccacctgtattgacgaaaggcacgcgtgcacaacatttctgcttggttcactaccacttgtctgctggcccgatctcaatgttataattgcccagcaacaaactaggacgcaactgtagagccatccagcggtgcagtgtttactgctttgacgtggcgtgtgaacttttagctgctatcaatgcgatgatataatgacaccacggagctgtttggactgccataccgtatcaagacggccagtagctgtgccgttgaaacctcaccctacttgcccgctgcatactactgcaacaaagaacacgtaaattcgagctgacagactttgcgtgaagcttttataggtgacaatgctcccagcacttgcatccctccagactcttcgatgggttagccaggatcgctggctcgaagccgcgacgtggaagcggcctgccacactgtcagtaaagttcactatatccttcttcagttagactctcaagatcccgcccctcgtcgcggcaattgaagtttgcaccgccgcaacaagttgcctttcaaaacgagcggccacgaagcgccggcgcttatagatacgcagacgcacctcccattggcaaaaactctcgtttttcgtccactcccctttcagacgcgttcaccccctcccgagtatacacagatcaagtcaatcttgccgcgccgtccgtccccgcctctccgccgcagattcgagctcagccaccaaagctcactctccgctcctcagccccagacgcaaagctaagccagcatggtgttcctccgcaagctcctggccacgtcggccaaggccggccgcgccgcggccacgcgctccatggccacgttcgaccgctcgaagccccacctgaacgtgggcacgatcggccacgtcgaccacggcaagaccacgctcacggctgccatcaccaaggtgctgtccgagacgggcggcgccgagttcacgagctacgccgacattgacaaggcgcccgaggagcgcgcccgtggtatcaccatctccacggcccacgtcgagtacgagacggccaagcgccactacgcccacgtcgactgccccggtcacgccgactacgtcaagaacatgatcacgggtgcggcccagatggacggcggtatcctcgtggtgtcggccggcgacggccccatgccccagacgcgcgagcacattctgctggcccgccaggtcggcgtgcccgcccttgtggtcttcatgaacaaggtggaccaggtggacgacgaggagctgctggagctggtggagatggagatccgcgagctgctcgaggcctacgacttcccggccgacgacatccccgtcgtcaagggttctgccctggctgccgtggagggccgcgaccaccccatcggccgcgacgccgtgctgcagctcatggacgaggtggacgcctacatcccggacccggtccgtgacttcgagaagcccttcctgatgcctgtggaggacgtgttctccatctccggccgtggtaccgtcgtgtctggccgtgtggagcagggtgtcatcaacaccggtgacgaggtggagctcgtgggactgaagcccagcaccaagaccacgtgcacgggtgtcgagatgttcaagaagtcgctcgaccgcggccaggccggtgacaacgtcggcctgctgctgcgtggcctcaagcgtgacgaggtgctgcgtggccaggtgctgtgcaagcccggcaccatcaacccgcacaccaagttcgaggccgaggtgtacgtgctcaagaaggaggagggcggccgccacacgccgttcttcagcaactaccgcccgcagttcttcttccgcacggccgacgtcacgggcaacatcctgctcaaggacggcacggagatggtcatgcctggtgacaacacggccatcgacattgagctcatccaccccatcgctctggacacgggtatgaagttcagcatccgtgagggcggccgcaccatcggtgccggtgtcatttccaaggttgatgcttagatattttctgcagaacggctgcagtagatacctggaagcgaagcctgccgagccaaacgtcgagtaagatgcgcggagagtgtcgaacttcgtaaccagcaatacatacacaaaagcaaaaacgtctctactatcgtttgcttgatcaagtttactgcgcagggatggtgaggacactcgtccagcagcacaaaagaatggattgctggacacaaaacgtatgaagctacgtgtatcatcatttcgtcccttgtttgcatcttgtttaccatagaaatcaatctttgtcttgtgtgtgtcgcccttcgcagattgcgtcaagcctactgcgagaacaaagagtctagcagtggtggcctaagacgccgctaccgatgcggccatagcagccttggccgaagctgcggcgctgctggtggcgcgcgactccgagatcgagctctggtacgtgcggaaggcgttaacaatgtgcgggaagctcggtcgcagctccggctgtcggttccagcaggccttcatgagcctcgagaagaacggcgggcagtccctcgggatgttgggccgcaggttgcggttgagcactccgagcgcggcctggatctgactcatgccgtcgtacggacactcgcctgtgacgatctcccagatgacgataccgaacgagaacacgtcggccttctccgtgtacttctggttgcccagcacctcgggcgccatccactgcaccgtgccgcagtttcctgtcatggtctgcacgtgggccttgacacgggccagtccaaagtccgacaacttgatgttgaagttcttgtccaccagcagattgggacttttcaggtctcggtgcagaatcggtcgctcaaagtggtgcaagtacgacatgcccttggccgtgtcgtagataaacctggagcgcatctcctggtcgatggacttgcggttcatgcgcagcacgccccagagcgagccgcgctgcagcaactcaacgaccagcgcgcgatgcggcggctccatgcacgcgcccagcagcctgcagatgttggggtgccgcagcacgctcatgatctccacctcggactggaactcgtttaggatgtcgctgcgcaggtcctggcagatgagcaacttgacggccacgctcttgccgcgccacttgccctcgtgcacctttccgaaggcgccctcgccgatcatgcggcccagcgtaatctcgttgaagttgatgttctggctgtaattggtggggcggtgcttgagcgcgctcctgtccttgtccttggccgcgtcaacaggcgcgggcggcggcttggccgcggctgcaacatcgggctccttgtgcgcgaccttagcgcggacatccttgtcgtcggcgctcacgatggttgcgtccgtcttggccgactcggggtcgctgttgtccgtgtcggtcgtggccttggtgtcgtggccggcgttgaaccaggccgagaggaagtgcgggatcttggccttcttggcgccgtccagcttgagctgctgcacgggctccatgggggcgccgatgaactcggtcgagttgcgtcggccgcggtgcttggcccgcccattgtcgttgcgcacggtggcaaccgaggcctcgtccgtatgtttggccgcctctgtggcgtcggccggcgactcttttgccttttcctgctgctgctgcttggccctttccgcgcgttgcttggccttctgttgccgccggagctcctcgcggaaggccgctttctggttgatgtccagcgttgcggcctccgagtccaccaccggcgtctctaaggcgggcgtgggcgacggccgcggaggcagcttgggcgcgcgccggcccgcgccgccgacgccgttgcccatcttgatgggggaccccaccgtgccgaagaacgtgctcgtgcgcgtgggcgccgcgtccgggtcgatgcgcagcgcgttgggcttcttgcggcgctggaacgtcagcttgcgctggttgccgcgcaccttggcgttctccttgttcatggcggcggcgtcttcgcttaggtagctgtaggctagtgctaaccgcgcgcaacaccaacccgccgacctttggggttgctggcgaagagggaagtggccgcgacggttgaccgagaacgcaagccactcggtaacccgagccgcccctctggaagcgagtcagacgtacgtcgccatagtgagccgcagtgagccgctgaactcttgcagcagtctctgccgcagcgacaacccaggctcaaacgaccgagggcaagcgattcgagcggccagctggaagccccaagtgtcaaatgcaaggcgaattactcacagagttgaagagccgagggtgcaatgggcaattgcatcactcactgctcttgcggccgattgacggcggcggattttcggcttcctctcgcggcggccatcgagactttgactttagcgccgccgcgaagcagcttagctcagctcagcgcatgttgacagcgcgcgcgcggcttcaactccgtgtgaaaggactgtccaagtccgagccggctgacagatggatatgcgatgccggcgtcaactcgcactgctctcggtctctctctctctcttgccaagagtcttgggtcttctgaacggagagaaattcgtccacagcatctttggtgcgtgttagcggatctcatgggttgatggacgagctttcgctctcttaccgctggttgaaggtggcatccctgcactattcgtcggccgaccgctgcagttgcacaaacggttgcaacattgcgagctctccagagaaagtctccgattgcagcgctgcaggtatcgcaccgccaactgctgcctctcggtgtattgcgtcggtggtcagcgcttgaccgtgaggacgtttggaggacactgtggttgaagctgactggagggaattttttagttttttttgccaggggaagagtccagcaggaggcattcaaaaaggcaacaatgtgcaagttttggcgggaagcaattggctgcaattatcctactacacgcaacctcttcatccgtgaccgagattccctcagtgcgtggctttttagaggcaatcactcgcgccgaccgcggtgtggccatgcgcggcagccatcggcctggcctggctgcaccaagcacttgagccacgtgatactttacttacttacgtgctcgacgtggggatcactcctgccagtgtcaaccaaacgcctcaatcgtagatgaacctgcggttaaggcttgtcattttattttttagagccacagcgacgtcggacgagcactttgccactttcgaggcggcagagcgaaggttgactctctttcgaggtggcagcgctatgcatttggacgcccacgcttggtcttcgctctccgtttcatcggatttgactcgctgactcgcctcgcctctcgtagcatttcgtggcgtcgcctcgccccatagaccgggttcggacggaacaaggcggagatgcagaagcgagtctctgggatttgagggggcacactgggtggccgcgccgagtctggcgttgcatggccacgccctggtcgctcgctcacttttgcagttgagactttggcgcccatacagtaatggacacagccagcgctctgggcggcatcccgcgcctcgagttctccaagcagcggcggcagcagctcgagtcgacgagcgacgacctcgtggagcgcgcgctcaacacgtacgatgagttccacgccaagaagcgcgccaagtccaccaagcactggaagctcgtgaagcggaagaagtcgctcaacatttacagggagcgcggcaaacccaagagcgagagccgcgtgtacatttgcagcggcgtcatgcccggctcggtcgaggacatgatcagcggcgcctactgcgacgacacggagaacatgcgcatccttatgagtgtgaccacagacaagttcctggatggccgagtcctgcacgtgttcgagaagaacccgatcaccaggagcgtcgtgttctcaggtattttgtggatggcgctcaagacgccgacgactgcaacgctgatccacgaccgcgacatgctctactaccagcggatcggccgcatcgtcgatcgtcgaggcaggtacttcgtctactgcgtcctggactcggtcgagctcgacgagctcccggctaaccagcagcacaacgtggtgcgcgcctcgctctccatgtgctatctcttccgacaggtgcaggaggagtgggtgggctgcttcgttatgggcaactcctccatgggcggcaccctgccgcgaagtctcagtgaactcatcacagcggagcggatgctggctataggcaacatgctgttcgtggcccgcgcaaaggcgtactcggcgcgtatggccaacagcgccgaccggatcccgtcgaccagcagctcgtgtgacgtgtgtatgaagaagccgaacatgctgagcggctcgctcaagctctgcatgggctgtcggcgcaacacgtgcaggaagtgccgcgagtggtgcaccgtgttccgcctcgagctgcgcacgcagaagcccgagagggagcgcttctgctcgcagtgcatctcggaggtgacgaggccaaccatgtccaacttttacgtctgcagtctcaacgagtctacgagcaacatgcccggcggctccaattccgtgtcaaactccagctattcaggtttccagcagggcagcagcagtccgtcgtcgtccccgcactcgcacgacttctccgaagtcgactcggacgcgtggctcccggctcctccagatctgccagagaacttggacggcctcgcctcgttcgtcgagcgagcaagcgccgccaacgcgagggatatgcagtggaaccaggaagagctcgactacttctcggacatcctgcgcgagtccgggcgattcaagccagacttcagcaaaagtgccgtcggtagcggccacaccagcagcagccactcgagacgaacgcagagctacacgcagggcttccacccgggcagctccctgcccccacccaatcatgagaaactcgaccgccgggtatctcggagctatgcgtcggacgattcgtccgtgccgcaccagaaattctttagcgtagatgagctagactaaatgacatggttccggcgccggagcccattgaaaagtatcttaaccagcagagaaatagagcaacaacttttacacatcactaggtacaatgtgcacggtaggtagtgtagaattgaatcttcatttaagtacattcactaggtacacacacatattcgcccctcctccagtctctctgctataagcttacaggctgctggtgatgacatctacaacggcgatgaggatgttgaacatctgcgagtacatgccgagcttggaggccatggccatctgcgccgacgtgttgatgagcggtgccgagggctccaccttctcgtccatgtccttgctgcccttggagcgcacctcgcgcagcttcttgcggaaccgctccttgacccagccctggatccgcagcacgacgctgaaccactcctcgaactcgagcgtgcggatcgacttgagcacgaagaaggtgcggcgcagactctcctcctcgtgcgagatcatcatgcccatgaggaagatcacgcagacgtagccggcgtactgctggtagtagtcgggcgacatgctgctggcagcgatgatgataccaagagccacaacgaacgtcgtgtacgtcgcgtagatgaagcgcacgcggaatccggagcggtgggcgaacagcacagcgttcaggaaacccatgtagtacacgggcttgggctggcccggcgcggtgttgtgcgatttctcgtacgcgtcgacgttgggacccgtagacacggccagcagcagaatacccatgcagcacacgtggcacgcaatgaccacagacgagaacacctgcgtggagcgcacgtagccgcccttgttgataagaacgtcgaggacgcggtccttggtcgcgtacttgatctgcgccgcctcgaccaccagcttcatgcgggccgtgtcctccgtcgatccgggagcctccgtcgaaacctcactcttgcggtccccaagctccccattgggcgccttgacaccgacggagaccatcgagtccctcgtgagcgcggcgttcttggcgtcttccgcctcctttacccaacgcgcgtagaacgccttgcccatgaagtacatgaacagcgcggccgagaagtagagcggcaccgtcacgccgaagcgcagcacgagcgcgtacgttaggtcgctgtcatcgacgaggccgtccttcttgaccttgaggaacttgatgtcctgcagcagcagcacgagctggttcagcagcagcgtccagatggcgaagcggatcgtgcggaacacgccctggtgcagcgagcccgagttagggttttcgtacgggaaggggtcaatgaggtaccagtagcggtagaagcactcctccacctccgggtggcggaacttgagcgaccagcggtgcatgagcgtcttcttactgaacttgtcggtcttgatctcggccacggcgtcggcgtccatcgtaccggagaagggcaactgcagacagaagttgcggcgcctcagcagctcctgacggtactgcgacaccataccgccgatggccgtgatgccgtagttaatggcctggtacgagatatccgtgtacgagtcgaagctgctcgggaccggcaggtgggtgcgcacgctggccatgacgatgccgtagccgaggaagatgctccaaccgatgcagcacgacttgacgaagcgcatgcgcgtgatgccgaagatcgggatgagcagaatcagcagcgggatgacggggcccttggccttctccacgggcttcttggcgatcatcatggtggccaccaccacgaacacgacggccgtgatgttctccaggtacttgcggccgaggctcgtgaacgtggccaggatgccgatcaccagggccggcaacatgatgccgaaggtcatgatcatgatggtcgtttcgtccgcgtccgagcggccgttggtggccgagtagttccacttgttggagcgccactcgttcatgtagagcgccaagagccccacgaagccgatgccgaagcaggcccgcacccggttcacagacgtctcctgggcgatggccaggtagttggcctcgtagaacgtgggggccacgttcgagaagaagagcgagcggcccatgttggtctgctgctggatgcgctggaactgctgcgtgtagtagctcttggccttgatctgcttcatgatgtctgcgtaaaggttaacatgacaggcaacaaaccaggttagcactatcgtaaaaaaaggttaagctagtgttaaacgggataagcaaacgctcgacacccacccttaaagccacccgtgtaattaggcggcgcattcgcgcgcaggatcacctcgttggcgtcctcgtcggtgtagggcttgctgctgtgcgagtgcacgcggctgcgggcgtggctctgcctttggctcatgctggcgctctgcctgctgcgggacatgcggctgtggttcgactggcgcgggccggccttgctcttgggggtatcgttcttcaactcgacaaatgaactggtgcgctcttccatgatgtaggtgcggtcctgctctgcggtggttgccattcacaggcgcactgagctccaaacctctaacctgcaacacccacgcacgacgcgacgacgcggtaagcccactggaggaggagagtttaactcatggaatgcaacacttctttcttgtggccacgtactcggtgctccgttccttgagaaatcgggaactggagctgcaggcaaacgcaaaacgcgatgcaaatgtgcgggcaggcgccgagaggacgttaccctaaatcgcgctcgaaggcaggactggcaccaagcgcgcacgcactgaccggctgtcgacaggttcgactggccctaacctgcaacacgcctgcaggatggacgccgcaaaaccaaaaatgacggcggcagcgagctgagagctgagagctgagttgctcacccttcgcagcatcgaggcgggaagtcattgttcacccatggcgcaaggcgggcgggaactggagccagatacgcatgacccctcctttctgtagccattgcatgcttccagcggtcgtccggttgaaagcggacaccttgcagcttctagaagttgcggggatttgactcccttgcaccaaagccccagcagcgcaggtgtgcgcgtgaatcagcccgcagccgattatggacttgggcgctgcgacctgctcgccgtccgcaatcgagtgcacggccaactaaatgccggcaagctgcaggtgaccgctgcctctgcgcgaacggatgtcggcaaaaaagcggaaacgattaagcagcagctgacttcagcattgacacgccaaacgtccggttcgccatactcaaaccaagccagacctgatgtatcactttgcacatgatacatgtagatcctgctaagatcgtggttaccactggtaactttgccccgatggcaggttgccaacacgctcacgtcgatggtcatcgcccacccgacgtctgctttaggtgcagccttcactaacatatcacaaacctctactaagtacacgtgtacccaaacgacaacatcaactcactctatcaccattgaaactacagtaccacaccaccaccaccaccaccaccattccacttcaacgcagctcagtcaagctcatcgatgcacacggtcttcggcttcgggtgcacgcgcgacgacgacagctccgactcgggctccaccggcccgggcacgcggatccgcgcgtactcctgccggtcctcgtcgaacaccaccgtccactcgccgctgcactcggtccacggaccggactgcacggccgcctgctcacaaaagtacccgggctcctccgcgtacaaatgctcggccgtggggctccccgagtagtcgtaacgttcgccgtgcgcttcctccagcggcgactgatgcagcccgttggacgtggccgagctgctcgagttgtccccgctgtagtgcctccgccgcgacgacgcctggctggacggggtctgctgggccgagccgctgcgatgccgccgctcgcgacgccgggacttgctgcacaagctctcgaggagctgcgcgatctccagcagctcctcctcgttccacgtgatgccctcctcctccatggcgatgctgtcgtggcaccgccgcgtgaactcggccagcttgtccagccgcatggaccggtcgaagcccgacttgttggcccccgaccactccgacttgtgcttaccatgccggccactgtcggtctcgcctgaacgggacgaccccaggccggagcggcacagcacgtcgtgcacctcctccagccctgcgctgctcttggcccctccgggccgcgtcaccttgtccacgcacaaccggcagaaatactccgtcgcaggcttggccgaccgcaactgcagccggaagacgtagcggcgctgccgacacttccgacacaccttttgccgacaccccatgcactgcttgtgtgcgaacccgagcattttcggcggcggcgacagacacacggtgcagtgcggcgctccgcccagctcggatatcctgtcgctactagccgccatcaacgcggagaaatgcttggccctggcgcagcgcaagaagttgccggcactcagcaccctctcggctgcaatgaagctcgagatactctgcgggatgatcgtggacaggttcatatcccccagcgtgaacacgcccagccagtcgggactcagctggcggtacagataacaccacgaaacgtccacgcgctgcacgccgcgctcgcggttggccggccgctccggcaggtcgatggactgcagcacgtggtaggcgaagtactggccgtcgcggtccacgatgcggcccatgcgctcgtaagtgaggaagtccttgtcgcccagcaggccgctcgtgcccgcgaagccgcgcatgacgaaccacttgatgcctgcgaacacgatgggcgcgcgcaggtcgcgcgcctcgaacacgcgcagcacggcaccgtccacgaagttgtcgctcagcaggctcttgcagatgcgcaggctctcggtcgagtcgcagtacacgccgttgagcgcgtcgtccagcgtgccgggcacgatgccgctgcccagcagcacgcgcgggccgtccgaggcgtccgtccgcggccggtagacgttcatggcgttgcggcgccgcacgcgctgccacgcgccgaggccgcgcgacgcgtggaagttgtggtgcgacgccagcgcgcggtcgatgaggtcgtcgcactggcggtcgagctgcgcgcggcgctcggcgctgaactggacggcgggcacgctcgacgccatgtcgtctcggaatatggcaaagtggcgtcgtccttgtgtcggtctgacacgctggtgatgggggcctctgatggagtgggttcggtggacggattgactcggaaaatgtatgcgagggatgttgccaagcgccagctggttctggcgcgatcgccacaattcagacgcagtcggatttgggaggaagaccaagcagcgttgtgaatcacaccttgccatcacaagttgccacaagttgtgaaaacttgtgatgggcgatgtacatgtaagcatgagctattccggtaacgtgaagtgccggggaccaacatgggctttgaacttgccgccgtgctgaaccccggggctttagatgtacggagtgtttggcgatacgggaacctgcatcagctcgggcatggagcacggaatgcaatggcgtggatagtacagactgggacgagtcagtgctgccccggaatgtggaccgccagtacccacttggactccaaaaagactcccgtttgcatgaatcaataaatagcgctgtacacacagatcagaagcacgttgtagctcgactggaaatgctacgtgccactcatggcctatgcaggattatttgtccaaattccgcgatgcaatccaaacgctctctacccgcgcatacatcaagcgaagaattctgcttcaactcgaagcccatgccacgaagaatttgcagcgtttctaggcgaaaccatcgaagaaatagcggcacaccgccaagcccgagctaaacacagcgctatggaagtctcactaaacggcggtcacaacgctgtcggacaaaggggacaagttaccgtgattctgcagttttacagtcgtttctgcatattacatgtattaatacctagtccaaatgagacggtttcaaaccatttagagttttcgagataatcgcaacccaacagacaacgcatacaacacccttcttaggttagaccgacaacaagaaactttacgctgctaataatgccaagtactaagattgggaggggtactgtactaaagttttagtggagagtgggttactattagagagtggggtactcttgtaagtccccaccaaatgtaatcacaaatgagaggtggggtactaattgagggtggggcacaatttagaggatactattttaatagaatatatttaaaaatatggaactggcgtgattatttgtatattaatataacacagagcatcagaaaaaacaacaaagtgtgatgataatttgatttaatattatatattaatttaagttttcatcgaaatattattttaaccgtggttaggaattgctattttgtagcagcatctaacttgcactttgaatttttttcagaaacacaaactaaatagactggtacttttgaaaaaatgacaaatacagtcgaatcataaccccaacaagatcttttaaggataaaacaaggatcaaatttgaggcaacccccttgatttcgtctttacacgtaagaagctatgacaggtatggatagaaaaggtctgtattcggtctacatgagggctggacctgtttgcgctagagttgtgatacttttgcgcagcagctcgaccaaaaggtcactcggaccgtatcgctttttcgagtttatccttacgttaaggacaatagcttggccaatagtagaaacaagtgaaaccgtcggcgactcttcgcgtccaacgcgaggccctctgtgatcgtacataagtgtgtgcatacaaatgctaggatgatttttatccttaaccggccagttaaaatcaaaatcaccctaaaattgagaccgccggatttgtttctgtccttattttaaggataaaatttgttgggggataaatgcttgaaaaataaggctaacctcaatgcaactgggaaaatagtatactgtatttaatagaatatgctgtaggatataacggtattccaaatgaatagtgtaccgtatacgatttggctttatctattagctgaagcaaaagaagaaaggcttgtagcataatatttgtgtctaaaaaggctagtccaacaagcaacacctttacgtggtatcagtagttgcaagttgatacagcgaatgcgtccaaatgaaatctatgtactcgaaagtccgagcagggacatcactcaatactggaaggcccacgaaatgtactgaaaaaaaaagatcgaaaataatgtctttaaaaagacaacagtacttggggcgtttgaaaagagtttgttggtcgtgtttgttttcgaaatgaggctcattgtcgccacctagctggcagctaacaactattaaagacttgttcccccagatgacaaacttcgtcatctaaggagtgggcgtatcgactcgcttttctcagcgtctgctttaaaaagagccctttccaccgctacaattttttttgaatatgtacagcattcggaaaactaatctatttagcattctccgttagaaaattctccattaggttacatcatttattcgatgcgttacccccagacatatcactttgtgcctacttgggtcttgttcatgatgacgatgcatgagcatggcgtcttccctacatacaaaacctggtgtttagttaccccaaattctaaagaagtatacttacagttactaatagttcttggagataagtagcgttctactattacgtttgaaccaaccaagccaagtaggttccacaatgaaagagccacgggttcactgggacaccacacggtcatatgtcgtgtaggaacacgcactaaattatataatagcacactttccccaccaacaacacccaccaagtcccgatgactcaatgggcttggtagggttagaacctgaaggcccaggaactttccctagcaccgggttgatgtttcctctgtgcaccgtgtttccgcttagtcaactgacggaaacccagcgtcaccagccacgagcaaaggctgacacgctctcacacacaatataacctcgcaggccctcaggaaggaagggtcccagccagtcacggcttgatacgagggtgccggagctatactccgacgggaaggataaatggagtgcgctctcgctcctccactacacggcgatgactcgcccttcgtatacacggccacttcttcactactcttggcctgaccacgggtaaacgcacgctacaatactagcaggcgcgtccatcgacagtcataatcctaccaacaggtttatccaattgctacgggaactcaccgatagcccggacgtcttccttgagtggttgggaggaaaagctgttctgttcttgtcgcccaaagggcttatctgttctatattctctttcctatcgttcaatacaaatatctagtataaacgcgtccgttttggatcttcccaagtaaccaccgacccttcagagccttctcgacgccccaagaggcctctcgatgactctattgggcgatgaagacttggagcagtcgccggggctcgaacggtcgtcttaagtgcggatctcgggtcaaagttcgctgtaagttcggatcgtacttgaagtcctgggtctcgaacttgggtgtcgacgagacttcggcaccggtccagaatggccaatcagcatccgccgaacattgctgaacatgtcccgacgactcgggtcgccactgaagcttggtcgtcagctcgattctcgtttaccgccaaatcactacaccacagctgcccccaccactatgtgaaccacatgatggcgagcgtcgtggtgcgttctgcttctgcttcctttcgctgttaacgacgtctggtgttgtttgccccggttgcgtgcttggtaggcgtctgcgttgtcgtaatgtcgcgccggtggctcgctgctgtaggcttacctggtccataactcgggttcgcaccgagccgccggggccgggttggcgaccgccgcatagtgtcttcgacctcgtccggtatagtgccgacatattgtccgccttcgccgccgttcgacgacctttgttgagttgagcagcggtggcatcatcgctttcgtcagactctgcttcgtagacaacggcacgacactccatgaccgctcggcttgattctgtacaaccacccggttctcgggaaccatacgatgatcagcatcatgatgcggccgtagactgcggtagctccttgcgcataggcttcagcaagttcctgcggccggtccggtcctcagaaaaacttcttagccaccatcttgtcgtagcgcgtctgacccagcgtagatcctgcttcaggcgcttcgagtcatcggcagttgtcagcgcacctccgtccgagctccaagcacaccaagtcttcgccagcactgcccttgagttgttgggggaagttgtagttcgttccaatcgggattctccattcgtatcattcgcgttcaatctccatgtagcatgcaaagctgcagtagccattttcgtctgcactcctgggctgcattgccccaggcgcagttcaccgtgagattgagttgtcgcggacgggggctaggcgttgcgcacgaccacgacactcttccagcaaagtccacgtgcagcattggtgcttgtagaccgcagaggttggtacgcagagacctcgattccatcagcctctttgacccgctccatgtacggccagatacgactgacccagtcgacgcgagatctcggtgtgctgttggtctgtccgttctctggataacctgcactatctacacaaaactcgcattcaccagtcgtcggcagtggttccattgtcttgtcggtccggatcggtggcttcgtctcgagcttggtgtggtgtggtaattccactaaaatcctcctctaccaaaagtaattgagacaccaacaacacgctaacccgcaaaggtaagcgcttattggatcaaaacctgaagaccaggaacgatcccttacaccgggtcggttgcaagcgcctctgtgcaccttaggttgtcttcggtcaacccaaaaacctgtaccactagccacgagctaaggctaggatactatgtagcgctttcgcgcaaccccactgcagtccctcagaaaggaagggtaccggcatgttaggccttatacagggggaccaagataaaacctcggtaggtagactaatacactcagggatactctaatcccacaaatatataccgaacgatactctaataccgttcctgcctctccggccacgccaactcttggcgctgccaaggaaactctcggtcaatgcacgataagctccccgacaggcatccacacgcagccgagcgtgtccaggcactacaataagctagctacacttaccgaagtcggacttgacccttgttggctttgggggaagagtgtctttttattactgagttttctgaggccctgggggcctcgttctggccatcctatgatgagtcctatgtccctatacaaatatctagtgtgaacgatcgcaataaggcgattccggacacatcaaatgacgaccgcggctacactaataagtgcggccgaagtacgtaactaaatgcatctgtacctaaaagtgggtaccatgaagcctcgttcggggttctattaggacccgacgaggcttcggccactgcctgtcactctaccgaggataatgtcatcatccaatcagaagcagccatctccgtctctcgcttgacctcgccttgatcgccccttgattgaacttgattgtcgggctggcgggtcaacagcgttggaaactgccactttccaataccacaactgcccccgcctcgacgcgagcctcccacggtggtgagcgtctaggcgtcctcagttcttcgactccatggctcctccgtcgcgtgcattcgccgacgcggctgccgctgctcttcgggctctccagtgctccggactggtacgttcgtcgctcccgctgcccctcactgtcattcggatcctcgttgttgactccatctctttcttgatcatctcagggagctgttgatgtcgccaccgacacttcgggtcgtcgtccggcgcgccaggctcgttcggcgggtgcccccgcccctatcgccgctggtgctgtgcccccagccccggccgcgcctgcaggtgaccctacgctcattcctgccgcctccgggacctcggtcgaccctccaccggctcctccaagtagtcctgagtctgctgctggggcgaccgagactccctcgctggcagttcccagtgaagaggctcccgactcgccgccgacaccgccgccaagcgccagcgctccaccgtcgccaactcccgcgccttcggtcacgttggcaactcgcgggtcgtcggtgggggacgaggcagctgtagggggtcgcgccggaactggtgctggcccggccgaggttcctccgacagcggtcgtcttgggcgagcagcagatgctggaactcgctcgtctcgtcgtgggtgttgcccgccagctcgagtcaacgctgctctcgaccacagcctgcaagctgctactaacgtcggtgaggtgctggctgccgccgttgctcctccgcgtctccctcttgcggaggctgatgaactggtggccctccgccgcgagaacgaccggctgcaggcagagctctccgacgccaaagataaactcgctgaagagatgaacctgcggaccaagtcggactacttcctcgtctcggccaactccgagtgcgaccaaggtctggacctcgtccaggacatgcgcgtccagctcagcaacgccagcgctctgttgatgcaagcgaacgcgaccatcgctcaccacgctgacgtcactcagtcgttggagaagcggacgctcgttgctgtggccgattcggccgctgctgtacgtcggaacacccagctccacgagcgtataagtgcaagcctcgttacctacaacactcagttggagaggcttcggaagcagttggccgaccgcgaccgagcaaacgtcatccccgcacgcattcaagcgttgacggacgagaacaacagcttgcggcgagcgaattctatccttcgtcggcactcggcagcacacggactcgacgtcgacaccttggtcctggcctcagccggcatctccgccgcagagattgattggaatcttctcgggctgtccccaccgacggtcactgtcgagggtccacgccatgacgaatcctcgtcagaggagggagaggagtccaagacgaccgacgtgccgatggctgagtccaccgaggctacgtccgctcccgctgcttcggtgggcgcttctgctggttccccggtctccactgagtcgtcatcgcgcaagcggggtcggcaaaccgagtctgcttccgtcgggaatacggcatcccagcctcctcctcacaaacgcttcggcagaccgtgagtcgacctgagggccagggctgcagcggccgccgcgccatctagtcctcgttcggcatcaggagagatttccccgcatcctcggtcgatggcgcgtccaacgacggctcgctcaagctggttggagtctcagcctctcccgtacgaacactcagacgtccccttgtatcctcggctggcccgtcgcgcctcgcctccctcgccagccccagcccagcagcaggaatcgtctgacgtggagtttggagggggtatgagtcctagcgacacttcacaagatgatcttgagcccggcgagattccgggggtgtcggccagcgctcaaggtgttcaaggttctgctaccgagccttccggtactgtcatcgaggttccatccgaggttccaccttcggcggcgacttccattccttcgccagtctcgtctggtacagccggcgtcggccgtgcccctcgagaatcggctgctggggtcaccgagggctctggcggtccgccagaccgttcacctagcggtgagtcgcctcatgagtccgagacttccgaggaccgcgcagcgttgttcctggagatgttcggccccgacgaaagagaggaaacctcggtggcgcaacctgtcgctcctttggaggctccttctcctctggctgccgcgaccggggttcctgtagcttcacaagcggccaccgtgccactcccgagtcgactccacactcggtcggcctctgttcacgctcgggcgatggtaacagcaacggtgacagcttcatcgagggctggacctgcgtcgattgccccagcagtggttgacgcttccgacgtagctcctggatcgcgtaagctcagtggtcttgctaccctgttcttggagccgggtttcacggcacccggagcgtcggaatgctggcatctcatccaaaacgccagtgtccccctcgtcttcgaggacgacttggtcgcccccagttcagtggatggaatcgtggagtttggcttgtggacggatcctgctcaccccttccaagtgttgcgccagcttttcccagacgagccttgtttgatcgatacgacgggttttccatcctcggtggctatatcccgtcgtgcaactggtcgggctcttctcgttcgcctatggcggcagttccaggggtactcctaccactccaccgagaggggcgaccttggtttcgccttgtgggagcgtcgccactggattaggggtaaagctgtcaaggcgtatatcgacaacctcgccaacaccctcggtcagcgcaacgtgcaagtcctagcgcttcgacaagcgtggtccaagtaccaccgagagcgcagttatcgtgcagatcgcttgcgagacccgatgctccacaaggtgtggaatggggccattacgtacggcggacaacctccacagcaccgcaccgaggttttgctggagccgtcgtacctgcaatactcgttcgaggtgatggagtgggtccccacttccgacgactgggcctccgaggtggcggacgtggatgcccgcgagccgtggcgtaactgttggttccaagcgctggcagaccacccctacaacactcctttcgccccttgcaacgacgtcccgttgtttgtccccaacggatcgactcgggaaaccgtggcgtcgtcggtcgtggtcgaatcttctctgcggacttcgatggtggtcgctccatgggtgaccgagttcgcaaacgctcgtcgttctcgctctccaagccccgatgaggagacgaaggagtcgggtgaagcttcttccgccgccgggtcaagtctgggcgtgttggctcaggctgtgatggagatttagcctcgttaggccccgctccagcttcaccgtttcgttcacgttcttttccaatgtcgaccgaggtccgtggcgctttaggcgacgctgcatgtgctatcccaatccaaaataacgtcatgttgttcgttccatttcataatcttttctcgcatcaacgcacatcgcattcaatactcggtcgcggttcccagagcttcttctctgccctcgaccgctgtggctgcctcaaacgaggcttggttcgtagctgcggcagccgggcttcgttttgtctccctgcaagaagatcgggcttatgctcgttgaagaccggacttgattcgcgggagactgggcgtacttacgctagctccgttgcgggtatgttttcgcatgacagcccaattttgacaattgtacacccggtctgctgcgggtatccggtgtcgacagcttgcatacccatttcatcatcaactccatactcaaccacgaagtcgagcgaccttgttcgtgctacttccatggcaatcactgcgtccgaagcctctgtcgccctcccatttgcttcatcatcacttgtttcgtctgttgagggtttgaccgaggcttgcttgcgtcttccgttgtccctggctccattccgatatctccattccatcgtgactcgttcacttaacacgtaacatgcagattccagtaactttcttcgcctgtcactgcgagctggatagccctcgcaggcggttcaatcatcatctccagtagcctcgttcgtctgacatcgcgggctggattgcccccgcgagcagttcaatcctcgttggggcgcagaattactcctcgtcggccacctggaccatttgcaaacgtcggtcgcttcgcttccggcgtaggtaatcgtacaggaggccgccgcacgagagattggacgctggttcccatgtcggctcgtcatagccgacccacttcaccttgaactctcggacggcccggtgagtgctcgttgacaacggtgtccggtcatcgaggatagcctcgacttcatactcaccgtccaggcggtccggctcaaaactgtcttcaggcagtaattcctcgtcgaagtcaagacgagtgccttcggtgacctcacgagccaaacgaaccctcggtcggccttcgaactcgtccactgacttgagtcgtgaaacatgcaccaccgggtagaaccggtatccacttcggtcgggtaattccaactcatacgcaaattcgtcgaccttcttcttcacgcggaacggtccgtgccaccgataggctagtttcttggtcagtcctggtcgaacccgctccatgtacagccacactctgctcccgggctgcaaagaaaacctcgttctcgtcactgcagctctactatggtcacgggaactcggtgcccggtcgaccgaggttcttttctcgttgacgcctgccacggcttccttctccttcctgccaagcgacgcattgtactcttcagctctccgagccttttccgcggcttggtactccttggccatcctcagggcgatttcctgctgtcggttgacctctcggcgccatgctagcgcgtcagtttggccaccgaagcctcgtttaagtgacgaggactgtgcatcccacccatgaacgaggtaaaacggagtttccttcctcgtcgtatcacgggagctattgatggcgaagatcagtctttcggtgatctcgtcccaatcctgctgtagtgggtcttcagcgtatacgcggactgactgcatgatcgtcttcaccgatctctcctactggccgttggcctgcgggtggtagctcagggtcgctctcgaccgagactgcatcatttccgcgaaggcttggaagacctcgctcataaatcgaggatctcggtcatgacggatcaaggacggtgctccaaaacgtcggtagacacactcctcgaaagcttgcgcaacgagtaaggcggtagtgtcagacatggctttgcccatcacgaatcccgtgaacgagcattggaatagcaggagagccttgttgccacggcgactcttcggtagcggtatcacgaagtccatagagactagttggaagggtctctcggctaggatgttccctggcgagtacccgcggaactgaggtcggctcttacttgaactgcagtcagggtacgacttaacgtgtttctccacatcggcatactggccgatccagtaatagtctctcgccgctcgatgtagcgtacgggtaataccttgatgaccgccttcaagtgagtcatgacagctttgcaagacgtcttggatcatcgttgtgggcaccacgagtctcatcttcaactcggcttgctcgccgtcacttgaacgacggctcgttcttgtgtaatatagcacatcgtcctcgctcaacacaaattggtccgccattttccatgcatctcgtgctgctctgtatccaatcttcgcatcatctccccggagcactgccttcagattcgaccaccgtaactcttcatcttgagcggaggcgattctccttcggcgttcttcctgtactaccagcgggtcaatgtcttctgcgtttggtggggctggtgacgtctcggcacgcagcggtgaagcttctgcttcattctgagactcgttcggcacaccattggcttctactcggtgagatgcgtctccctgatcggtgaccgagacttcatatccaaaccggacgtgtttctcctttgctctcgtttgacgtctggtcatcacagctacgtgtccgggttcagtctcgttctgccgtctgcggtcggtttctcttcgcacaaaatcaaaaaaaatgcttgctacgaggtttggcagaagctaccacggcccatactgtgttggccgagggtatgtcctcgacgacgcaaccgtcagcagcgtcgtagatgacttcagcgatacggttcagcttcatcaactctaatactcggtcgtccgacgataccaccgtagactccttgcactcgagagtctcgcttgccagtccgccgcagcgttgaactctctcaccacatgcaggtacttcaccgaccgaagcttggccgtgagttcttggtggcggctgagttgttgcagcaatgactccttccgacaggctatcacccctagggcttgctggatcgcgatcctcaagtcgccaacgacaactagatcgtcggctccatgctgtaatgcagcagcgacgccgttgttcatcccggtgtactcagcgaggttgaccgtggtgttctcgaggtaagcgctcgcagcgagcactactgtccactctggtagcttccatagtatccacgagcaactgccgtatccaccgttcttctcggttttcgcagacccgtcaaacgacataacgaagcctcggtaggaccgcggtaggcgtgcgtagagcagatgcgagtccaaacgagcagttggtgaccgggtgtgaccaacgccagtgacttatccaagtcaacgaagttcgtcaagccggcttgaagtagctgagcaaacgaacagtgggtttctttgactcgttcgaccaacaggtgccacggcgacagcaagacggcgaactgggtagcccgaccgaacaatgtcttggacttgtggagtcgaaaaccgagtgtagacccggattcgttgtccaacgagttgagtataacacaccttcagtatcagcagaagcgcgaggacctctttctcggccgggtgataattcatctcagcatccctcaaaacacgtccgcagaagcgaacggggtgtagtttgccctcgtgctcttgcatcaacgtggaacttagagcccactcgttggcgaacaacatgacatgcacctccttcttccggtcgaagtgtcgtagtatcggtgctgccgaaaccttctgttggagcatcgcgaagctgtgcttggccgcggtgaggtcacccccgggctggaagtcctcgtccttaagctggtacagcgctgctccatagaccgcgaagtcttggatgaagcgactgtaatagttgagtgccccaaggaaggactgcattcctttcctcgttgacgggaacggaagctcggccaccccagccagcttcttagcgtccggtcggatactttctgccgagaattcgtgggacaggaagtctaccttggactgcacaaagatgctcttcgtgaagctgatactaatacggcactcttcaaaccgtgccagcaatcggcctagcgtcgccaagcacgactcgaaagtctcggcaccgaaacagatatcatccacgaataaccggcgactgaatactggtgtcaacgaggagtcatcgggctccccgttggcgaacatgtcggcgatagggctgctgaccagttcggctacagctcccttaccaagcgagttgtctcagtcggcctcgaacttggtccggaatggctttgccgtgccagtcgaagcttcgttcaccccagcatgagcttccttgtcatgttcttcagctagacgcatgcgctccgagaatttaaaccatcctcccgtcggttggacgaagccccaaagcgcgttgtcaatcatgcgttgatagatcatcggtgcgttcttcaggccgaaaggcatacgcaaccattcgaagtgccccagtgcgcagacgaaagcagagatcttccgagctcgttcggtcatcataatggcccagaagccgctagcggcgtcaagcgagcaaaaccacaagtacgcctccatgtccgtcagcaagtcatccaccaggggcatggcgtactccataatctcggtgatcgcattaacgagtttgtagtcgatacacaggcggatatccaccccattcttcttcaggacgatgacgattggcgacgcccatgggctgtccgagaaggagataagcccggccttcagcagacccttcagcaattcgtacagcttaccgaggaagcgaagcggggtccgccgagccttctgcttgattggcgcttgcccctgtacattgatgtcacacacgaccccgtaggctggaggcggcagggcgttaccgctcgcaatcatgatcttctcgtggctcttcagcacatcgaccagggccgtctgctgcttcacgctgagttcgtcactctggacgttttgccccgagtagtccagcgtcgtctccgacgcttcggttaggtccggcaagaacgccagctcttgcgcgtagtcggtaagctcaatctcgttcgcgacgtgctccgaaacgtcgttcacggtgtcatcaccttcgccagacccttctgcgaccatggcatgcatgaccgagatataggtcgcctccagtagctgctcggggtcgtcgatcgcacttagatccgaatcatggaattcagtgtcggcgtcagcggtggaggttccggcttcagtaggaacgtcgttaggccctgggtcgtgttcaccccagtcgacttcgctactacacaccgcagccgacgtttcctctggctccaggctggacgcagcggtccctgttggcaggacatcccatgtagttgtctcggccactgctaccacgtcacggtcatcctccgaaccgtcgttcgtcacgctgtcaccatcgctcagctcatcactggcttccgatgcctcaaccgaggcgtatgtcgctccctgaccgggggagtcagcaccactgttcggattcacggacaggcaacccgctcggctaggcggcgagtctccgggtacgtccgagtcatacgacgcgctggcctcgtcgtccgaaccatcgttcgacccagcagcacgatccacctcggttgtatcagctcgagcgacatcgaccgagccttcactgaccctggggtcgtcgtcgtagccatgtacatcgggtgacgagtactcatcatccaacggagcttgttgacggccttctggccatggcggtgcatccggtggcctcggcaggatctttcgcggcgtcgggtaagttcggcgctcgaccgcaggcggctgttcagccaaccattgctcgtagagacgacgttctcgtccttgcagagtctcatcacgactcgtcgaataggccaacacctgccactctttgtacttgttagaatccaacctcgcgtagccggtctctcgtggtagttcaccatgcggtacccacagcaccacggagtcatgcttggcgcactgtgccgctgtggtcgtaatattggtggccgtatccacgtcggctacccccgtcgaaacctcgttacggtcgacacgagcttgcccgtgcgtcgtacccacacatcgtactccgaacgaggtagccgctggcgcggcagtcgaaactctcgccactcgcgaccgggtacgtataaatcctcgatcggcccacacgaaggctgcgtgccgtaaggttcgtcatcttcagcactctgcgactttagcagtggtaccatgacctcgtccggaaggcttgcggtgccatgaaatagatccagccggattccagcggggatcatgaagtccatcccaaggaccacatccaccccggtactgtgatccattatccacatttcaaattcgtagacctgctcccacccgagggtgatcttgacgagcgcccgtcgccgggtctccatcacccctgggttgatggcgcggacttcgagactttgtccgtggtcccggacttctcgcacacgtagccgcttggcgaagctggcagaaatcacgctaacattcgctccagtgtcaaggagtatcctcgttcgcgcgtcgtccactgcgccattgaccaaagccctcattcgcttcctcttgtcgtatcgttgggacgaccaccaccccagtctctcaccgggcagtaatttcaccgcccgaacgaggttccgaggtggcccccttatctgggctagacttgtgatcaaagcctcggtcgggtgtccatcacgttcatcatcatcatcttcatcaataccaatcgcaacgagacttgcgtcccggttctctccattttccgtcagtttcacacgttcattgttcttcaggtcgtcaggccgtttgctttcgcccgtgaacgcgaacagatagtccgcatcaacagcaggctcagctaactgtggcagccggattgggaccaacccagtttcagttggcgggctgcctagtttaaatggcttccatacaccaggctttgcagctctggtgacagatccttcttgtcgaccttggacttcaggagcttggtgagctcgtggagtgacttctaagtttcggtcgtcacacgtgaccaagaagtggtccacgtggtccttcgcgtcacgaccaccgttttcaaattgcacaccggcgttgcgagcgtagccgttgagccggttgagctagtcacaaacgcgttccttgtcttcccgcttggccgagtagtaccgagccttcgcagactgggaaaacttcgagcaatagtacttgatgaacgcctcgctcagcagcttccacgtgcgtcttgtcttgcgtgagagctggcgacaccagtgcagggctccatccctgagcttaagttcgaacggcatacaccactcgttgggtggtgcatgtgttcccttcatctcatagatgaacgttcggagccactgcatggagtgctcgctcttgtcgcgcgttccgtagaacggcttgatgttggcgagaggcaaatgcgtggcgatctcgagctttggggttgagctctggttgtcggtcgcgcttagctcgcgcacctgacgtgcccattcactcggtaggtccccttcgtagtagtcgggcccgaggtcgtcgtcgctgtccgacgaatcatcttggaggtcgtaacgtcggccggaccgacgaccggtcgctccgcgcgtgccaggcgtggcgaatgaagcctcgttctccctagccagacgttcactacggtccgtagaccgtggagttaccatgtgcgagtcttgcatgtacggcgaagcctcgcccttgactgcgaagactccgtcatccgtggctgccttccgaggggtcgctggtagcgggaccttggaagggtcaaccgctcccggggccgaacgaagcttcgttgagcctcggtctgccaccccaaaggcctcacgtaacttctttctccacttggtaagagccttggcggcggtggttggcgtccagctcgcgagagcagcttccatcgggaggatcagaggttcgcaccccatcgcccgcagggggtccacagtgttctgaacgacctgccgagtgctcgttgagttgatcggtgttgccaaagcccctccgaggtccatccagatggcctggcggacctgcttcggggagaacaactgcatccactcgctcttggtcttcatgagctccaggcatcggcctagaaccttgttggccgccggggtatcgccgttgaggggaggacgagtgccgaccggcttggaggttgcccctgctatcgtcaccgaggctctgaaaccctcggtcgcaccgtcatccgcgtcataggcgggctcggtgcccggcatgtcgttgaacgtttcggagaggtcgcgggtgatcgacctcgatcctccactgcggcccgccgacacaaccgcagcttccgaagtctcggacgtcacagtcctgacatcccagtcatcgtcttcatcatcttccttggcgtccgaggaatcaatcgccgtgtcgtagctcaccgagcgctcgtcgatcgactccatccgatccgtcgctggggtcgagaacgaactcccggagagcatcgaagcatcgttgcgcgttccactcgacttcaccggcgtcgctggtaccgctgacttgactcctttcgccatcttcacacgtcttcttcttctcttctcttctcttctcttctcttctcttctcttctcttctcttctcttctcttcttcttctcctctttgctcgttggggtaagacctacaacaacccagacacaccgatggtcgcaccaatcccgggtcgcggcaccagttgtggtgtggtaattccactaaaatcctcctctaccaaaagtaattgagacaccaacaacacgctaacccgcaaaggtaagcgcttattggatcaaaacctgaagaccaggaacgatcccttacaccgggtcggttgcaagcgcctctgtgcaccttaggttgtcttcggtcaacccaaaaacctgtaccactagccacgagctaaggctaggatactatgtagcgctttcgcgcaaccccactgcagtccctcagaaaggaagggtaccggcatgttaggccttatacagggggaccaagataaaacctcggtaggtagactaatacactcagggatactctaatcccacaaatatataccgaacgatactctaataccgttcctgcctctccggccacgccaactcttggcgctgccaaggaaactctcggtcaatgcacgataagctccccgacaggcatccacacgcagccgagcgtgtccaggcactacaataagctagctacacttaccgaagtcggacttgacccttgttggctttgggggaagagtgtctttttattactgagttttctgaggccctgggggcctcgttctggccatcctatgatgagtcctatgtccctatacaaatatctagtgtgaacgatcgcaataaggcgattccggacacatcaaatgacgaccgcggctacactaataagtgcggccgaagtacgtaactaaatgcatctgtgcctaaaagtgggtaccatgaagcctcgttcggggttctattaggacccgacgaggcttcggccactgcctgccactctaccgaggataatgtcatcatccaatcagaagcagccatctccgtctctcgcttgacctcgccttgatcgccccttgattgaacttgattgtcgggctggcgggtcaacagcgttggaaactgccactttccaataccacattggcttgtgaccgagtcatcggcgcggccatggtaggctcaatgctccttgaactactgctggagaaatcttgggaccgaaaagaatcaccggaaagcacgttctgcggggatatcccgtccggatcgattttgtagatcacagcttggcgttggttgagctcacagagcgcggccttcctatcgccactcaaaaccaccttcgacgtctgagattccaacgcttcagaagctagcgagtccgcggcagcattgtattcctgtgcgacgtgaatgtatctcacagatcgcagtcgggccttgacctcctcgtggtaactcggttgagtcatcgccccggagtcagctgcccctagcgagtgcaacaacgccagccttgaattgctaacaacgaccaagtcgtcggcaccgagttgtaaagccgccagcacgccgtatgtcataccggcgctctgggcaagggggctcgtcgtgtcggcgaggtaagcgttcgcggcaatcatcaatttccactccggtaggcgccacacaatccatgcgcagcttccatctgcaccatactgcccaggctgtgtcaagcccgcgaaagataccacgcaccccgtatgactcttcggaagccgtgtctttgagaggcttaacgcagtaggagtcgtcgggaaacttccagtcggtagccacgcgctgtcatttgtcgcatcatcctcgtccatgtccagtacgctcatcaccgacataaaggtatgctccgccatagtgaggggagtgtgcgcgtcgtaacgggggaccagatgagttgtcggtgcttcattggtcaggtcacaatgcggtttcaaatccggagtgtctccgtttgtcgccacagtcggaaactgagttatcgagggttgatcgggagcaatttcggccacttgtggatcggctggcgtgtcgtcgggagcgacttgactgcttctgcccggtcccaaggagcttggttccggatcattgcccactggcaagccgtcagaatcctcacccccgtcgctgtcgaacagctccgagatttgctcgccccgagagtattcgggaggacgttggagcagtccggttggaatagggtactcgggtcggtccactgccgacggctggccggctaaccattgagcgtaaagctcggcttcccgcttgagcagcgtcttatcgcgggccgcttcgtaggcaagaatttgccattctcgatacttgtcagagtcgagccgcacatatccctcagacttcggcaacgacccgattggtacccacaccacgatggttgtgtgagccgagcagatcgtgagccgagtgtcaatgttcgtcagtcggatccgctgcggtcgtcccttgtggaaccgcttcaccgtagggatgagcttgtcggtccatcggatccacggcacgtgagtcgtcggggacggacgtttccgttgcattcggaactctttccattctcggccgggaatctggagcacgtcgaccgggcccccgttgacgtggaccccttcggcctcgtcgaccatgttctgcgtcttgatcagcgggatcattacttcgtccggtagcttggccgccgcgttgaagagatccagccggatgtcagccgggatcatgaagtcggtgcctagcaccacgttaacaccggcattgtggtcgataatccacatctcgaaaacataaacgcgttcccatccgagcgtgatcttcacagacgcccccgagtcgtcgtcgccttgcccttagtgataccctggacctccatacaccgaccatgacccggaatatcctagatcctcagctggttggcatacttctcagaaataacactgacgttcgctccactgtccagcaagatccgcgtccgcgagtcgttgaccgctccgttcaccagcgtcctcatacgtactcgtcggtcaaatttctgcgccgaccaccatcccatgcgttttccgggcaggaggcgtacctccacgtcgagtcgtcggcgcgatgcttcctgcactgcacttgtcatccagtcttcggtagtgtcttcaatcacttcgtcatcactcttctcactcaaatcacctccaccgaggccttcgcctctctccttttcgaattccgtcgcgttcacccatgtacctcgtccttcatccggccattcgcgcttgcccacaaaagcgtagatacactccgcttcgactacaggctcggctaactgtggcagcccgattgggaccaacccagtttcagttggcgggctgcctagtttaaatgttccgtgaagaggaggttctcgagctcaggagtgaggtccttcttgtccactttgttgcgaacaagcttggtgagttcttggaagacctcgcaccggcctgcgtcgtgtacttgcttgcataactggcagcgccggttgcagaagtgggccgagtgggaaagaacgccacaggccgcgcaaggaccgtactggcgttgtcgattgtcgtgaccgcctcggcgctggtaccggttgtcccgactgggttcccggccactctgatcgcgtcggggaggccggttgtcggacctggctacgtgccgtcagctgccgcgcatcgctcactctcgttcgcagcagccacgtagtggtcgctgtcatccgacgagtaaccatcgtgtctgccttcttcggagtaccacgagtcgtcggagccttgatcgctggcggcgtcgctgtcatcgttgaactgctggcgcgcactgtcgcgtccggtcgaggtgctcctggcgtcccgtccttgcagctcagcgactatgtcttccacagatgcgtcagccagggtcacgcgaggaacgttcctggagtcgtcgcgacgacgctcataatctcgttcgcgtcgatccccacggctgtggccagttcgcgagtcatcgcggcggtatccgtctcgggtgtcttggcggtgccggtcatctcggcgacgcgagtcatacgcgtgtcatcacgtcggcgggacggttcccgagccttggatcgcgactgcgaagactcgcgcgaactctgtcgctcttcaaccttcagcatttcgatgatcatctcctccagctcatggatgtccttgattcgcagaggagcgagtcgtctctccagcttacggtcgccgcaagtccccaggaagcgcttgacgtggtccttcgccttgcggccgccgttcacgaactggacgcctgcgttgcgggcgtagccgttgagtcggttcaggtagtcgcagacgtgctccttgtcgtcgcgcttggcagagtagtatcgggtttccgctgactggctgaactgggagcagtagtagcggatgaaggcttcgctcagcagagtccaggttcgcttggtcttcttggtcaattgtcggtgccagtgtaccgcaccgtctctcaggcggagctcgaagggcatgcaccattcattgggcggcgcgtgtgtacctttcatctcgtacacaaaagcgcgcagccactgcatcgagttctcgctcctgttgcgagcgcccgagaacgtcgggatctgccccagcgtcggtgcatcgctacctcgagcctcggcgtcgggttcacggtctctgcgtcgctcacctcccggatctgtcgcagatattcgtccatttgcgcacctccgtctcccgtgaagtcatcgtcgtcatcagatgagtcgtcggcgtagcgggacttgcgacttgagcttcgtccggtgcttcgtagactgctcctggtcaatttcgagtcttcggcaccacgcgcaactcggtcagtacgagtcgtcgcgggtggagtgaccatatgggagtcttgaaagtacggcgatcgctcgcccgacgcactgaacactcctctagtcgcagcctgggctgagttactgcgctcggtcttcttcggagttcgcgggagcgggacgcgcgctgggtcagcgctgcctttgttggtgcgggccgccttcggctgttccaaagagaagggggtcaccccgaaggccgtacacaacttcttcttccattgccagagctcggctctggcttccgcgggcaggaaactctccagagtcgacggcgacggggcaagcgtgggccggagacacaacgccttcaggaacgtcaccgtgtccttcgccacttgctcaactgcgaccgcattcactggtcgtgccaactcgtggctcaggtcagcccacaccgcttggcggatcatgcgcggctcgaagagtcgaccccattcgctcgcacgcattgcttcaaagcatcggccgagtaccttgttggctgccggagtgtctccattcatcggcggccggttgcccgaggtttgctcggtcacttgagtcgtcggcaccggcgatcgtgagtcgtcggcgcggtcttcaaactcttccatgtcatcatacgctggctcagggtcgtccacatcatccagttcgtccgcgaggttgcgcgagacgggaggcgtgtcgtcttccaactcgctcgcgagactgcgcgccagggagcgcgagcccccgctgcgccccgcggacatcactgcatcttccggagtctcgggtgtcaccaccgctggcgcaggcgccttctcctccaggtagtcgccgtattcttcatccatctcttcatctttggcgtcggatccagtcatcggctcgtcgaagctgacgttgcgctcagcaatcgggtcgggctgcggtgtgatcaagaccgccgtcgagtcgttgtcaccacccgactcttcagaactctcttgaaggctcggacggcctcccgatgactcgaagagtcgccttaggtgcggaacccaggccaaagttcgccgtaggttcgagtcgtccttgaagtcccggtgttgtgtggacacaccacggcttgagcttgagtgtcgacgagtcgtcgtcattggtccagactggccaatccgcggccgtcgaacgccatcgaacgaatggcgatgtgcctcgatccgccagttgagtcgacgccgaatgccgcggggcttgccgtgagcttcactcaactttctcgacaccacatgatcgacaagggctgctgcatgcggcggcgtaatcgccacccctccgaccttgaaatcgacgtgagcgtgatgtacgtccatcgcaaattaagcttgtgcaagtgcttctaaaacctaccaagaatgacgccaaagatgaagagatggatgaagaatacggcgactacctggaggagaaggcgcctgcgccagcggtggtgacacccgagactccggaagatgcagtgatgtccgcggggcgcagcgggggctcgcgctccctggcgcgcagtctcgcgagcgagttggaagacgacacgcctcccgtctcgcgcaacctcgcggacgaactggatgatgtggacgaccctgagccagcgtatgatgacatggaagagtttgaagaccgcgccgacgactcacgatcgccggtgccgacgactcaagtgaccgagcaaacctcgggcaaccggccgccgatgaatggagacactccggcagccaacaaggtactcggccgatgctttgaagcaatgcgtgcgagcgaatggggtcgactcttcgagccgcgcatgatccgccaagcggtgtgggctgacctgagccacgagttggcacgaccagtgaatgcggtcgcagttgagcaagtggcgaaggacacggtgacgttcctgaaggcgttgtgtctccggcccacgcttgccccgtcgccgtcgactctggagagtttcctgcccgcggaagccagagccgagctctggcaatggaagaagaagttgtatacggccttcggggtgacccccttctctttggaacagccgaaggcggcccgcaccaacaaaggcagcgctgacccagcgcgcgtcccgctcccgcgaactccgaagaagaccgagcgcagtaactcagcccaggctgcgactagaggagtgttcagtgcgtcgggcgagcgatcaccgtactttcaagactcccatatggtcactccacccgcgacgactcgtactgaccgagttgcgcgtggtgccgaagactcgaaattgaccaggagcagtctacgaagcaccggacgaagctcaagtcgcaagtcccgctacgccgacgactcatctgatgacgacgatgacttcacgggagacggaggtgcgcaaatggacgaatatctgcgacagatccgggaggtgagcgacgcagagaccgtgaacccgacgccgaggctcgaggtagcgatgcaccgacgctggggcagatcccgacgttctcgggcgctcgcaacaggagcgagaactcgatgcagtggctgcgcgcttttgtgtacgagatgaaaggtacacacgcgccgcccaatgaatggtgcatgcccttcgagctccgcctgagagacggtgcggtacactggcaccgacaattgaccaagaagaccaagcgaacctggactctgctgagcgaagccttcatccgctactactgctcccagttcagccagtcagcggaaacccgatactactctgccaagcgcgacgacaaggagcacgtctgcgactacctgaaccgactcaacggctacgcccgcaacgcaggcgtccagttcgtgaacggcggccgcaaggcgaaggaccacgtcaagcgcttcctggggacttgcggcgaccgtaagctggagagacgactcgctcctctgcgaatcaaggacatccatgagctggaggagatgatcatcgaaatgctgaaggttgaagagcgacagagttcgcgcgagtcttcgcagtcgcgatccaaggctcgggaaccgtcccgccgacgtgatgacacgcgtatgactcgcgtcgccgagatgaccggcaccgccaagacacccgagacggataccgccgcgatgactcgcgaactggccacagccgtggggatcgacgcgaacgagattatgagcgtcgtcgcgacgactccaggaacgttcctcgcgtgaccctggctgacgcatctgtggaagacatagtcgctgagctgcaaggacgggacgccaggagcacctcgaccggacgcgacagtgcgcgccagcagttcaacgatgacagcgacgccgccagcgatcaaggctccgacgactcgtggtactccgaagaaggcagacacgatggttactcgtcggatgacagcgaccactacgtggctgctgcgaacgagagtgagcgatgcgcggcagctgacggcacgtagccaggtccgacaaccggcctccccgacgcgatcagagtggccgggaacccagtcgggacaaccggtaccagcgccgaggcggtcacgacaatcgacaacgccagtacggtccttgcgcggcctgtggcgttctttcccactcggcccacttctgcaaccggcgctgccagttatgcaagcaagtacacgacgcaggccggtgcgaggtcttccaagaactcaccaagcttgttcgcaacaaagtggacaagaaggacctcactcctgagctcgagaacctcctcttcacggaacatttaaactaggcagcccgccaactgaaactgggttggtcccaatcgggctgccacagttagccgagcctgtagtcgaagcggagtgtatctacgcttttgtgggcaagcgcgaatggccggatgaaggacgaggtacatgggtgaacgcgacggaattcgaaaaggagagaggcgaaggcctcggtggaggtgatttgagtgagaagagtgatgacgaagtgattgaagacactaccgaagactggatgacaagtgcagtgcaggaagcatcgcgccgacgactcgacgtggaggtacgcctcctgcccggaaaacgcatgggatggtggtcggcgcagaaatttgaccgacgagtacgtatgaggacgctggtgaacggagggtcaacgactcgcggacgcggatcttgctggacagtggagcgaacgtcagtgttatttctgagaagtatgccaaccagctgaggatctaggatattccgggtcatggtcggtgtatggaggtccagggtatcactaagggcaaggcgacgacgactcgggggcgtctgtgaagatcacgctcggatgggaacgcgtttatgttttcgagatgtggattatcgaccacaatgccggtgttaacgtggtgctaggcaccgacttcatgatcccggctgacatccggctggatctcttcaacgcggcggccaagctaccggacgaagtaatgatcccgctgatcaagacgcagaacatggtcgacgaggccgaaggggtccacgtcaacgggggcccggtcgacgtgctccagattcccggccgagaatggaaagagttccgaatgcaacggaaacgtccgtccccgacgactcacgtgccgtggatccgatggaccgacaagctcatccctacggtgaagcggttccacaagggacgaccgcagcggatccgactgacgaacattgacactcggctcacgatctgctcggctcacacaaccatcgtggtgtgggtaccaatcgggtcgttgccgaagtctgagggatatgtgcggctcgactctgacaagtatagggaatggcaagtccttatctacgaggccgcccgcgataagacgctgctcaagtgggaagccgagctttacgctcaatggttagctgcccagccgtcggcagtggatcgacccgagtatcccactccaaaagggctgctccgacagcctcccgaagactctcaagacgagcacagctcggagtcgtccgacagtgatggaggtaaagattctgacggcttgccagtgggcaatgatccagaatccgcaccaaaagaagttgcgcaacggatagttgcagccgtcgacgactcgacaggggtgaccctcaatactcgagtgcaagcagctaccttggagacgtctgagcgccctgctgtcgtcgggaaccggcttggacgaacctacggagtcaaagagtgctgaggatgaagtcccgacgactcaatcctgctcgaactcggatatcgaggccggtttgacacgactcgagcagacgttcatgtgtgtcttgcgggtcttgagcacagaaggtacagagaccgcgaatgacgacgccgctgactcgttcgagcatctcgcggctggtattgggttggaagactacgcgcacgggctggcgttccctcctgacttgtccgaagctgctacgaccactctggactacgacgcagacaatgtgcggaatccnnnnnnnnnnnnnnnnnnnnnnnnnnnnnnnnnnnnnnnnnnnnnnnnnnnnnnnnnnnnnnnnnnnnnnnnnnnnnnnnnnnnnnnnnnnnnnnnnnnnggccgaacgaagcttcgttgagcctcggtctgccaccccaaaggcctcacgtaacttctttctccacttggtaagagccttggcggcggtggttggcgtccagctcgcgagagcagcttccatcgggaggatcagaggttcgcaccccatcgcccgcagggggtccacagtgttctgaacgacctgccgagtgctcgttgagttgatcggtgttgccaaagcccctccgaggtccatccagatggcctggcggacctgcttcggggagaacaactgcatccactcgctcttggtcttcatgagctccaggcatcggcctagaaccttgttggccgccggggtatcgccgttgaggggaggacgagtgccgaccggcttggaggttgcccctgctatcgtcaccgaggctctgaaaccctcggtcgcaccgtcatccgcgtcataggcgggctcggtgcccggcatgtcgttgaacgtttcggagaggtcgcgggtgatcgacctcgatcctccactgcggcccgccgacacaaccgcagcttccgaagtctcggacgtcacagtcctgacatcccagtcatcgtcttcatcatcttccttggcgtccgaggaatcaatcgccgtgtcgtagctcaccgagcgctcgtcgatcgactccatccgatccgtcgctggggtcgagaacgaactcccggagagcatcgaagcatcgttgcgcgttccactcgacttcaccggcgtcgctggtaccgctgacttgactcctttcgccatcttcacacgtcttcttcttctcttctcttctcttctcttctcttctcttctcttctcttctcttctcttctcttctcttctcttcttcttctcctctttgctcgttggggtaagacctacaacaacccagacacaccgatggtcgcaccaatcccgggtcgcggcaccagttgtggtgtggtaattccactaaaatcctcctctaccaaaagtaattgagacaccaacaacacgctaacccgcaaaggtaagcgcttattggatcaaaacctgaagaccaggaacgatcccttacaccgggtcggttgcaagcgcctctgtgcaccttaggttgtcttcggtcaacccaaaaacctgtaccactagccacgagctaaggctaggatactatgtagcgctttcgcgcaaccccactgcagtccctcagaaaggaagggtaccggcatgttaggccttatacagggggaccaagataaaacctcggtaggtagactaatacactcagggatactctaatcccacaaatatataccgaacgatactctaataccgttcctgcctctccggccacgccaactcttggcgctgccaaggaaactctcggtcaatgcacgataagctccccgacaggcatccacacgcagccgagcgtgtccaggcactacaataagctagctacacttaccgaagtcggacttgacccttgttggctttgggggaagagtgtctttttattactgagttttctgaggccctgggggcctcgttctggccatcctatgatgagtcctatgtccctatacaaatatctagtgtgaacgatcgcaataaggcgattccggacacatcaaatgacgaccgcggctacactaataagtgcggccgaagtacgtaactaaatgcatctgtgcctaaaagtgggtaccatgaagcctcgttcggggttctattaggacccgacgaggcttcggccactgcctgccactctaccgaggataatgtcatcatccaatcagaagcagccatctccgtctctcgcttgacctcgccttgatcgccccttgattgaacttgattgtcgggctggcgggtcaacagcgttggaaactgccactttccaataccacattggcttgtgaccgagtcatcggcgcggccatggtaggctcaatgctccttgaactactgctggagaaatcttgggaccgaaaagaatcaccggaaagcacgttctgcggggatatcccgtccggatcgattttgtagatcacagcttggcgttggttgagctcacagagcgcggccttcctatcgccactcaaaaccaccttcgacgtctgagattccaacgcttcagaagctagcgagtccgcggcagcattgtattcctgtgcgacgtgaatgtatctcacagatcgcagtcgggccttgacctcctcgtggtaactcggttgagtcatcgccccggagtcagctgcccctagcgagtgcaacaacgccagccttgaattgctaacaacgaccaagtcgtcggcaccgagttgtaaagccgccagcacgccgtatgtcataccggcgctctgggcaagggggctcgtcgtgtcggcgaggtaagcgttcgcggcaatcatcaatttccactccggtaggcgccacacaatccatgcgcagcttccatctgcaccatactgcccaggctgtgtcaagcccgcgaaagataccacgcaccccgtatgactcttcggaagccgtgtctttgagaggcttaacgcagtaggagtcgtcgggaaacttccagtcggtagccacgcgctgtcatttgtcgcatcatcctcgtccatgtccagtacgctcatcaccgacataaaggtatgctccgccatagtgaggggagtgtgcgcgtcgtaacgggggaccagatgagttgtcggtgcttcattggtcaggtcacaatgcggtttcaaatccggagtgtctccgtttgtcgccacagtcggaaactgagttatcgagggttgatcgggagcaatttcggccacttgtggatcggctggcgtgtcgtcgggagcgacttgactgcttctgcccggtcccaaggagcttggttccggatcattgcccactggcaagccgtcagaatcctcacccccgtcgctgtcgaacagctccgagatttgctcgccccgagagtattcgggaggacgttggagcagtccggttggaatagggtactcgggtcggtccactgccgacggctggccggctaaccattgagcgtaaagctcggcttcccgcttgagcagcgtcttatcgcgggccgcttcgtaggcaagaatttgccattctcgatacttgtcagagtcgagccgcacatatccctcagacttcggcaacgacccgattggtacccacaccacgatggttgtgtgagccgagcagatcgtgagccgagtgtcaatgttcgtcagtcggatccgctgcggtcgtcccttgtggaaccgcttcaccgtagggatgagcttgtcggtccatcggatccacggcacgtgagtcgtcggggacggacgtttccgttgcattcggaactctttccattctcggccgagaatctgcagcacgtcgaccgggcccccgttgacgtggaccccttcggcctcgtcgaccatgttctgcgtcttgatcagcgggatcattacttcgtccggtagcttggccgccgcgttgaagagatccagccggatgtcagccgggatcatgaagtcggtgcctagcaccacgttaacaccggcattgtggtcgataatccacatctcgaaaacataaacgcgttcccatccgagcgtgatcttcacagacgcccccgagtcgtcgtcgccttgcccttagtgataccctggacctccatacaccgaccatgacccggaatatcctagatcctcagctggttggcatacttctcagaaataacactgacgttcgctccactgtccagcaagatccgcgtccgcgagtcgttgaccgctccgttcaccagcgtcctcatacgtactcgtcggtcaaatttctgcgccgaccaccatcccatgcgttttccgggcaggaggcgtacctccacgtcgagtcgtcggcgcgatgcttcctgcactgcacttgtcatccagtcttcggtagtgtcttcaatcacttcgtcatcactcttctcactcaaatcacctccaccgaggccttcgcctctctccttttcgaattccgtcgcgttcacccatgtacctcgtccttcatccggccattcgcgcttgcccacaaaagcgtagatacactccgcttcgactacaggctcggctaactgtggcagcccgattgggaccaacccagtttcagttggcgggctgcctagtttaaatgttccgtgaagaggaggttctcgagctcaggagtgaggtccttcttgtccactttgttgcgaacaagcttggtgagttcttggaagacctcgcaccggcctgcgtcgtgtacttgcttgcataactggcagcgccggttgcagaagtgggccgagtgggaaagaacgccacaggccgcgcaaggaccgtactggcgttgtcgattgtcgtgaccgcctcggcgctggtaccggttgtcccgactgggttcccggccactctgatcgcgtcggggaggccggttgtcggacctggctacgtgccgtcagctgccgcgcatcgctcactctcgttcgcagcagccacgtagtggtcgctgtcatccgacgagtaaccatcgtgtctgccttcttcggagtaccacgagtcgtcggagccttgatcgctggcggcgtcgctgtcatcgttgaactgctggcgcgcactgtcgcgtccggtcgaggtgctcctggcgtcccgtccttgcagctcagcgactatgtcttccacagatgcgtcagccagggtcacgcgaggaacgttcctggagtcgtcgcgacgacgctcataatctcgttcgcgtcgatccccacggctgtggccagttcgcgagtcatcgcggcggtatccgtctcgggtgtcttggcggtgccggtcatctcggcgacgcgagtcatacgcgtgtcatcacgtcggcgggacggttcccgagccttggatcgcgactgcgaagactcgcgcgaactctgtcgctcttcaaccttcagcatttcgatgatcatctcctccagctcatggatgtccttgattcgcagaggagcgagtcgtctctccagcttacggtcgccgcaagtccccaggaagcgcttgacgtggtccttcgccttgcggccgccgttcacgaactggacgcctgcgttgcgggcgtagccgttgagtcggttcaggtagtcgcagacgtgctccttgtcgtcgcgcttggcagagtagtatcgggtttccgctgactggctgaactgggagcagtagtagcggatgaaggcttcgctcagcagagtccaggttcgcttggtcttcttggtcaattgtcggtgccagtgtaccgcaccgtctctcaggcggagctcgaagggcatgcaccattcattgggcggcgcgtgtgtacctttcatctcgtacacaaaagcgcgcagccactgcatcgagttctcgctcctgttgcgagcgcccgagaacgtcgggatctgccccagcgtcggtgcatcgctacctcgagcctcggcgtcgggttcacggtctctgcgtcgctcacctcccggatctgtcgcagatattcgtccatttgcgcacctccgtctcccgtgaagtcatcgtcgtcatcagatgagtcgtcggcgtagcgggacttgcgacttgagcttcgtccggtgcttcgtagactgctcctggtcaatttcgagtcttcggcaccacgcgcaactcggtcagtacgagtcgtcgcgggtggagtgaccatatgggagtcttgaaagtacggtgatcgctcgcccgacgcactgaacactcctctagtcgcagcctgggctgagttactgcgctcggtcttcttcggagttcgcgggagcgggacgcgcgctgggtcagcgctgcctttgttggtgcgggccgccttcggctgttccaaagagaagggggtcaccccgaaggccgtatacaacttcttcttccattgccagagctcggctctggcttccgcgggcaggaaactctccagagtcgacggcgacggggcaagcgtgggccggagacacaacgccttcaggaacgtcaccgtgtccttcgccacttgctcaactgcgaccgcattcactggtcgtgccaactcgtggctcaggtcagcccacaccgcttggcggatcatgcgcggctcgaagagtcgaccccattcgctcgcacgcattgcttcaaagcatcggccgagtaccttgttggctgccggagtgtctccattcatcggcggccggttgcccgaggtttgctcggtcacttgagtcgtcggcaccggcgatcgtgagtcgtcggcgcggtcttcaaactcttccatgtcatcatacgctggctcagggtcgtccacatcatccagttcgtccgcgaggttgcgcgagacgggaggcgtgtcgtcttccaactcgctcgcgagactgcgcgccagggagcgcgagcccccgctgcgccccgcggacatcactgcatcttccggagtctcgggtgtcaccaccgctggcgcaggcgccttctcctccaggtagtcgccgtattcttcatccatctcttcatctttggcgtcattcttggtaggttttagaagcacttgcacaagcttaatttgcgatggacgtacatcacgctcacgtcgatttcaaggtcggaggggtggcgattacgccgccgcatgcagcagcccttgtcgatcatgtggtgtcgagaaagttgagtgaagctcacggcaagccccgcggcattcggcgtcgactcaactggcggatcgaggcacatcgccattcgttcgatggcgttcgacggccgcggattggccagtctggaccaatgacgacgactcgtcgacactcaagctcaagccgtggtgtgtccacacaacaccgggacttcaaggacgactcgaacctacggcgaactttggcctgggttccgcacctaaggcgactcttcgagtcatcgggaggccgtccgagccttcaagagagttctgaagagtcgggtggtgacaacgactcgacggcggtcttgatcacaccgcagcccgacccgattgctgagcgcaacgtcagcttcgacgagccgatgactggatccgacgccaaagatgaagagatggatgaagaatacggcgactacctggaggagaaggcgcctgcgccagcggtggtgacacccgagactccggaagatgcagtgatgtccgcggggcgcagcgggggctcgcgctccctggcgcgcagtctcgcgagcgagttggaagacgacacgcctcccgtctcgcgcaacctcgcggacgaactggatgatgtggacgaccctgagccagcgtatgatgacatggaagagtttgaagaccgcgccgacgactcacgatcgccggtgccgacgactcaagtgaccgagcaaacctcgggcaaccggccgccgatgaatggagacactccggcagccaacaaggtactcggccgatgctttgaagcaatgcgtgcgagcgaatggggtcgactcttcgagccgcgcatgatccgccaagcggtgtgggctgacctgagccacgagttggcacgaccagtgaatgcggtcgcagttgagcaagtggcgaaggacacggtgacgttcctgaaggcgttgtgtctccggcccacgcttgccccgtcgccgtcgactctggagagtttcctgcccgcggaagccagagccgagctctggcaatggaagaagaagttgtgtacggccttcggggtgacccccttctctttggaacagccgaaggcggcccgcaccaacaaaggcagcgctgacccagcgcgcgtcccgctcccgcgaactccgaagaagaccgagcgcagtaactcagcccaggctgcgactagaggagtgttcagtgcgtcgggcgagcgatcgccgtactttcaagactcccatatggtcactccacccgcgacgactcgtactgaccgagttgcgcgtggtgccgaagactcgaaattgaccaggagcagtctacgaagcaccggacgaagctcaagtcgcaagtcccgctacgccgacgactcatctgatgacgacgatgacttcacgggagacggaggtgcgcaaatggacgaatatctgcgacagatccgggaggtgagcgacgcagagaccgtgaacccgacgccgaggctcgaggtagcgatgcaccgacgctggggcagatcccgacgttctcgggcgctcgcaacaggagcgagaactcgatgcagtggctgcgcgcttttgtgtacgagatgaaaggtacacacgcgccgcccaatgaatggtgcatgcccttcgagctccgcctgagagacggtgcggtacactggcaccgacaattgaccaagaagaccaagcgaacctggactctgctgagcgaagccttcatccgctactactgctcccagttcagccagtcagcggaaacccgatactactctgccaagcgcgacgacaaggagcacgtctgcgactacctgaaccgactcaacggctacgcccgcaacgcaggcgtccagttcgtgaacggcggccgcaaggcgaaggaccacgtcaagcgcttcctggggacttgcggcgaccgtaagctggagagacgactcgctcctctgcgaatcaaggacatccatgagctggaggagatgatcatcgaaatgctgaaggttgaagagcgacagagttcgcgcgagtcttcgcagtcgcgatccaaggctcgggaaccgtcccgccgacgtgatgacaggcgtatgactcgcgtcgccgagatgaccggcaccgccaagacacctgagacggataccgccgcgatgactcgcgaactggccacagccgtggggatcgacgcgaacgagattatgagcgtcgtcgcgacgactccaggaacgttcctcgcgtgaccctggctgacgcatctgtggaagacatagtcgctgagctgcaaggacgggacgccaggagcacctcgaccggacgcgacagtgcgcgccagcagttcaacgatgacagcgacgccgccagcgatcaaggctccgacgactcgtggtactccgaagaaggcagacacgatggttactcgtcggatgacagcgaccactacgtggctgctgcgaacgagagtgagcgatgcgcggcagctgacggcacgtagccaggtccgacaaccggcctccccgacgcgatcagagtggccgggaacccagtcgggacaaccggtaccagcgccgaggcggtcacgacaatcgacaacgccagtacggtccttgcgcggcctgtggcgttctttcccactcggcccacttctgcaaccggcgctgccagttatgcaagcaagtacacgacgcaggccggtgcgaggtcttccaagaactcaccaagcttgttcgcaacaaagtggacaagaaggacctcactcctgagctcgagaacctcctcttcacggaacatttaaactaggcagcccgccaactgaaactgggttggtcccaatcgggctgccacagttagccgagcctgtagtcgaagcggagtgtatctacgcttttgtgggcaagcgcgaatggccggatgaaggacgaggtacatgggtgaacgcgacggaattcgaaaaggagagaggcgaaggcctcggtggaggtgatttgagtgagaagagtgatgacgaagtgattgaagacactaccgaagactggatgacaagtgcagtgcaggaagcatcgcgccgacgactcgacgtggaggtacgcctcctgcccggaaaacgcatgggatggtggtcggcgcagaaatttgaccgacgagtacgtatgaggacgctggtgaacggagggtcaacgactcgcggacgcggatcttgctggacagtggagcgaacgtcagtgttatttctgagaagtatgccaaccagctgaggatctaggatattccgggtcatggtcggtgtatggaggtccagggtatcactaagggcaaggcgacgacgactcgggggcgtctgtgaagatcacgctcggatgggaacgcgtttatgttttcgagatgtggattatcgaccacaatgccggtgttaacgtggtgctaggcaccgacttcatgatcccggctgacatccggctggatctcttcaacgcggcggccaagctaccggacgaagtaatgatcccgctgatcaagacgcagaacatggtcgacgaggccgaaggggtccacgtcaacgggggcccggtcgacgtgctccagattcccggccgagaatggaaagagttccgaatgcaacggaaacgtccgtccccgacgactcacgtgccgtggatccgatggaccgacaagctcatccctacggtgaagcggttccacaagggacgaccgcagcggatccgactgacgaacattgacactcggctcacgatctgctcggctcacacaaccatcgtggtgtgggtaccaatcgggtcgttgccgaagtctgagggatatgtgcggctcgactctgacaagtatagggaatggcaagtccttatctacgaggccgcccgcgataagacgctgctcaagtgggaagccgagctttacgctcaatggttagctgcccagccgtcggcagtggatcgacccgagtatcccactccaaaagggctgctccgacagcctcccgaagactctcaagacgagcacagctcggagtcgtccgacagtgatggaggtaaagattctgacggcttgccagtgggcaatgatccagaatccgcaccaaaagaagttgcgcaacggatagttgcagccgtcgacgactcgacaggggtgaccctcaatactcgagtgcaagcagctaccttggagacgtctgagcgccctgctgtcgtcgggaaccggcttggacgaacctacggagtcaaagagtgctgaggatgaagtcccgacgactcaatcctgctcgaactcggatatcgaggccggtttgacacgactcgagcagacgttcatgtgtgtcttgcgggtcttgagcacagaaggtacagagaccgcgaatgacgacgccgctgactcgttcgagcatctcgcggctggtattgggttggaagactacgcgcacgggctggcgttccctcctgacttgtccgaagctgctacgaccactctggactacgacgcagacaatgtgcggaatcctgagttgtcggcgacacgacaggacgatctaatcaaggtgctcaagaaccatgagccaattatgatcgcaagcggtaatgcgttaccaccaccagcatatggggtggtctgtgacatagacgtgcaaagggcacgcgccgatcaagcaacgagcctggcggataccactaccgcatctcaagaagctgtatgagctgctgagagggctgctcaaggctggactcgtgtctttctctgacagcccgtgggcatcgccgatcgtcatcgtcttgaaaaagaacgggatcgacattcgactgtgcatcgactacaagctggtcaatgccatcacagcgatcatggaatacgccatgccactcgtcgatgacttgttaaccgacctagaagcatacctctggttctgctcactcgacgctgcgagtggattctgggccatcatgatgacgctacgagcgcgcaagatctcggccttcgtctgcccgctgggacacttcgagtggcttcgcatgcctttcggcctcaagaacgcgcctatgatctaccatcgcatgatcgacaacgcgttgtggggtcatgtccagccgaagggaggtttgaaggcctttgcggtgctgatgggagctgccgaagccgaatcagcacgtctccgacgactcgagtcgtcgggatacctgcagaacccttccgcagcgtcccgcacgaagtttgcagccgcccacgatggctcgcaggcactagatcctgtcttgctgctgatcaacagcccggatgcggacatgtttgcgaccaacgagcccgacgactcgtcactggttccggtgtttgatcgccgatcgtttgtggatgacatatgcttcggaggcgagagcttcgacgactgtcttgccacgctggaccggctcttgagccgatttgaggagtgccggatcagcgtcagcttcaccaagagcatattcgtgcaaggacgcgtcgatttcctgtcgcacgagatctcgcgagatgggatgcgcgcagaccccaagaaactggacgcaatcacgaggccgtcgttccctcggacaaaaaagggatgcagaccttcctcggagcgctgaattactacagccggtttatccaagacttcgcagtctatggagccgcgctgtaccagctcaaggacgacgacttcgcgcccgggggtgacctcgctgtagcccgccgcagcttccaagcacttcagcagaaggtggcggcggcgccgatccttcggcacttcgacaagaagaaggacgtgcacgtgatgctttacgcgaacgaatgggcactcagctcgacattgctccagatgcacgacgactaactgcaccccatgcgcttctgtggtcgcgtcttgaaggacgcagaaatgaattaccatcctgcagaaaaggaggtgttggctctactccagctcctgaagacctgctatacgcagctagcgggacggaccatccgcgtgtacacgcggttctctacgttggaatggatcaccaagtccaagtcactcttcgggagagcttcgggagagcggtgcaattcgccgtgttgctttccccgtggcacttgatcgtccagcgcgtgaaggagaaggattgcgtattttcacaactgctccagtcgacggtaaccaactttgtggacctcgatggacctggttgctccaccaacgaaaggctcgccgacgactcgtatggacccaaacctcctgtacgcacgtctcccgaagactcacacggggtttgtggtctcctttgacggctccgcgaagaccgagaagtatggtggatatggcagttgttcgtggatcgtgtggcgcctaccagaatgaacaatagtgattgcggtgagcgcttacctcgagaagacgactgttaatctcgccgagtacactggcatgaccaacggagtgcttgcagctttggaccatgacgccgaagacttggtcatcgtcggggactcgaggctcgcgatccagcaatccctaggggtgatcgcatgccggaaggagtcgctgatgactcagctgagtcgccacaaggaaatcacggcacgactgcggtcagccaagtacctgcacgtggttcgagaattcaatgcggccgcagactcattggcgtcggaaacacttgaatccaagacgtcgaaggtggtcctgagtgaaactcagaagacagagctctgcgaactgaaccgcatccaggaagtgatctatgagtcgacgccagatgaagcaacagtgcaaaaccatgttcctggaggctctattcaaattgcggacggatacgaggtcaccaaacccaggacattcgctgatttcgtgcgcaaagaacctttcaggatcatggcgatgactcgttcacaggctagatcgaagacgaagcgagcccgatttgcggacgacagtacgaacgagatgccacccaagccgatgactcaaaccgacaaagagcacactgatgaacgaccaacgaaagcagctcaagcaccacccgcagcaccaaacgcagaagatattgaccccgtcgaaatccaagcggagaggcgacggcgcatagcagccgctcaggacgaggaaatacggtgggcaaacctgaagacagtcctccgaggcaaggtcgaaaagctcgggtacagggctgcacgagatgccttgaaaattgcggacaagttcgttctgtccgacgacggagtactctacaatgtgaattcgagtcgcaagaggagatcaagctgcgtctcgtggtacccaccacgatgattcaagaagtgttgcagaactgccatgactcgctagaaggcgggcaccaaggggtagtgcggacctaccagcgagtcaagcgggattactattggttcggcctgtacacagacgtcgagaagcatgtgaagtcatacccggactgcagcaccagcaaaagccgaccacagttgcgagggtattctcccggtaacgtgttggcagagcgaccactccagattgtgtctatggacttcgtaataagctcccgatgactcggagaggcaacactgccctcctcctgttccaatgtgctttcacgggatttgtgatcgccaaggcaatgtcggacacgacagcgctcaaggtagccaagctttcgaagagtgtatataccgatgattcggagcaccttcgttggttagacacgaccgggatcctcgctttatgagcgaggtgttccaggcctttgccgaaatgatgcagtcaaggtcgcgggctacgctgagttatcggccccaagccaacgggcagcaagagaggtcggtgaagacggtgattcaatccgtgagagtgtacgccgaagacccgcttcagcaggactgggacgagatcgtggaacggttggtcttcgcgatcaacaactcacaagacatgacacggaaggaaactccattcttcctcgtccatggatgggacgctcagtcgacgttgaaagcgatgtcgtcctcgcttcgcagggtcagtagcagacaatccgacgcgctggcgtgacaccaggacgtcaaccgacaacacctgattgcactcgagatggccaaggaataccaagtgactgaaaaagcccgccgagcgcgtgaacataacgaagcactgagccggaaggagagagcaaccatcccgacgactggcagggacaagtcgtcgacagcaacgccaaccaatcaggacgcggactcagacccctcaagcaacgcgccgatgtctttattcgagccgggtagtcgcgtatggctgtacatggaacgtgtcaagccggggctgaccaagaagctggcccaccgctggcacgacccgttccggatcaagaagaaggtcgaagagtacgcctacgagctcgagttgccgaaccggagcggctatcggttttacccggtagtccatgtctcgcggttgaagccggtgagtgaattcaaagaccgcccgaagactcgactggcgcctgacatcaccgaagactcacggctggacttcgacgaggaattactccccgaagacagctgggaacttgatagtctggccggcgagagcgaagtgttggagattctggatgatcggatgcccatgtcaacaagaaccggacgctcagtgcgtgaattcaagatcaagtgggcagatcaggacgagcccacgtgggaaccagtcacccacctctcctgtgggggtcttctctacgactaactgaggcgcaagcgaagcgagcaacgccttcagatggtacaggtcgcggacgaagattagagctcgctcgcgacgactcaaagatgatgaactacgcctggggcaacgcagcccaggagggtagacgaaaatgactactgcggaagatggtgacctgtacctggggcaatgcagcccagaaacgcagacaaagacgattactgcagaagacttgcatgatttttatttttagaaaactggacgtgacgatctggaagaagaatcaagaaaacctaaataccccaagctgatcgcacctacgactacaaccgtgaaactcaaacagcttgggtggaagaaacacctgcacccgaagactcaccgttcctagtcgtcaccatcctcgcgagcgtcaccctgcaactcagcagaagctgcagcctgcgccagcacctggaggtggtccgagtgtcgagagccacgtgagaagtagctgcagacgccggaggctcgcttggctcaggacccgaagactcgtcggaagcttgggcaggttcacggaaaccagcatcccaatcagccgcgatctcgtttggcgtgaggtcgggacaaacgacgatctggcgcccgacttcctcgcgcggggtgtttgcagggacgaacagcgggaaccttggattgcaggggaagaacgtcgtgttgtacggatgctgggcaggaacatccacccagccattacgccacggctcagccgcgtccaacgccgaaatctcgctgacccagtccgtcgtcttgggcagccatgtgaggttgtcgaaagggcaacccagcatagaaggcttaaacaaagactcggtgtggagagcagcgaacttcggttccttgctgacaaaccacctccagacctggtagatgatcttggctcggaaccgatcccagcgcttgttccgctcggcagcatacgccaaccactcagccttggcctcgtccagctcagctcgaactttggccttcgcctcaggggaccaattgttcccttccagctccttagtatcgacccggaagcaattctccacggcgggagccggaatccagtggtaacgctcccaatccgagaacccaagatcgatatcgtcaggatccccgtaccctcgaaagttgctccaatacccgttaactcgagccgtcgggggcgctcgctgggaaggatcaaatccatgggtgtcgaacaaacatgcgtgctccgtgagacgccggcgaagcggctgccaagacttcttgaagtctttaaacgccttgatcccagcaggcgtggcagcaatccgagcatcgtcggaaataggagtcggcaactcgcaattcaaaatctggatccagcacttagaagcgccaggaaaccggaattcaggagccaagtatggagtggcccagttcaacacgtgtttggagtaacgagcagtgggcagcacatctcgggctgccggcgaggcagacagagagcgcgcagaacttgaacttggtcctggggccgataactgcgtagtgacgacttggcgcgatgacaacttatggcgagacttagccggcttcttacctcgggcacgagtcgtcggaaccttctgagatgccgcatttgcaggccggtgagccgatgagacagcgaccgaggtgtccgccgactcagcagaagctgcaggaacaagcggaagagaagccgatgactcagggctggcaggaggcagagctggcgcaggtgacgagagatcagtggaagccgatgacgacagaccgtcagcaaccggaggtgacggagctggaattacagcaaccacctcaacgcgctctccctcccactcgtcgagttcctcctcatcagcagaagcagcaccgccatcaaccactgagtcgtcaaccagaccctccgtcaatccagcatccgagtcatctccgaaccactgaggcacctccggagactgctcgactgaagctaactgctcgtccgtctctccgcgatcagcccgatgactcaagccaccaacttgtggatcatcaccgaaaccagtgactgggacaacagcttggacaggagtttcagcagaagcagcaggcggcgcagaaccaggaacagagggcgcagtagccttcgagactggagcaggactcgtgggcggagagacactggaaccgatgaagcgcgcgtagaccggagagccgcgaggcaccgacgcagaacgacttcgtgcccagcgagactccttccgcttcttgggcaacttcttgggcttctccgacgacttcctcacgggagacgatgacgccgattacccagccgatgactcggcagaagtattgcgagccttcgaccctgagcgactcggccgagctggggaagcagcagcactgacgtagcccgagtcttcgcgagacctcttgcgggacgagaaccgtggagaagacgatgaccgacgcgacgcgcgagatttcttcccccggagtggtcttgtttgcaccagcgggagtgtccttgcgcaagggatccccgatggagtcattcagtgagaaggcagtccaagccaagtcttcggcaatatctctgtccggcttggagcggtctgctgtacggtacgtcttctgcaaaatcgcgagagactcgggagtaagatccagcaagctccaattgagttcaccagtcgagatacctgcaagcaagatgagtcatcgggacaaagtcagcaaacataaaccaaatgacgaccaaatggtgactacgaaccttctacggcgaggaccaggacgtcggggtccattgcttgcagatgcatgtgagcgcgaagcgtcttgttggcacgggtcagccgcttcacttgctcttcgaggtcctcattgcggcggcgaaggcgagctggtgcggtgttgtcggcggcgtccgagcaaagccagcagatcgtgtaagcgcctgctttgagcagtcgacgatgcaacggccgccttgtagacctcctgctcacgtttcaactgagctagagcccgagcttgcgagtctccggccaccctgacatgattctcctgccgctcggaacactctctgaggccatccacggcggcgttcgacgactcgagctcgacgatgtaatgagcctccagctgacgaagatgcgcgacatccttcttcagctgtgcgatctcgtcgttcgcgttcttcaagaataccttctggttctccaacgagtacgtctgcgaccgcaaccgattctctgcagcagtctgcgctgactcagcagagtgcagccgggcgcgcatagttgccatgtccagcgtcgagccttcgccaacatccatgttcggcttcgcggcagtaaccacttcatcgaggttccgggccgacgccaggcgagaacccacgcgacgatcaccacggatgctcggtcccagctgcaggttcaccgagagacggccgagagactccagcttcgagcccagcaccgccaagatgcgctccgacgactcatcacatgcatcacggaccagctgctcaagggcgtcgcgacgcataacttgaccacgaccgcgcgagttgtcgggagcaggctgagaagatccaggagacccagggcgagatgttgccggggttcccgaagactcgtggccacgcatagccacgaaaagtggatgcggaggcacgccaccagccgactgcagatataagcagacgcatcaacgagaacaacgtcagcacgagtgaaaagaagggagacgcatgcagagacagggtacgcacctgcccggcatcgtctggacgcggagtaccggcagccgtcgacccagcgcgagcagaagacgacgaccgagcaggcgaagacgcagtaaaagcctggtcggagaggccgccaccagaactcgacgcagcaggagcctgccgccagcagaacaagcgcacacgcgtgagggtgagcagtcggcggcacgagcaggagaccggacgcagcacgtaccatgtcagcgggatcgacgccgagcgcccggaacgcgcgggccagcgcagccttcgcggcgcgagacgacccagccgtggtagcgcgaagccaccgcgagcgccctgacgctcaccaagtgctgtggctcgcgacacggtgtgggcagctgtggtgtcgagaaagttgagtgaagctcacggcaaaccccgcggcattcggcgtcgactcaactggcggatcgaggcacatcgccattcgttcgatggtgttcgacggccgcggattggccagtctggaccaatgacgatgactcgtcgacactcaagctcaagccgtagtgtgtccacacagcaccgggacttcaaggacgacccaaacctacggcgaactttggcctgggttccgcacctaaggcgactctttaagtcatcgggaggccgtccgagccttcaagagagttctgaagagtcgggtggttccctggaagattcacaaccgagacgtctagattagatatttgtattgaaccataggaaagagaagatagaacagataagccctttgggcaacaatgacagaacagcttttcctcccaaccactcaaggaagacatccgggctatcggtgagttcccgtagcaattggataaacctgttggtaggattatgactgtcggtggacgcgactgctagtattgtagcgtgcgtttacccgtggtcaggccaagagaagagaagaggtggccgtgtatacgaagggcgagtcatcgccgtgtagtggaggagcgagagcgcactccatttatccttcccgtcggactatagctccggcaccctcgtatcaagccgtgactgtctcggaccctttcttcctgagggcctgcgaggtttatattgtgtgtgagagcgtggcagcctttgctcgtggctggtgacgctgggtttccgtcagttgactaagcagaaacacggtgcacagaggaaacatcaacccggtgcaagggaaaggtcctgggccttcaggttctaaccctaacaaggccattgagtcatcgggacttggtgggtgttgttggtggggaaagtgtgctattatataatttagtgcgtgttcctacacgacaatcagctccatgtttgctcgtgacgtccactgccattgggaccgaagaagcgtgcaaggcgtcatgctgcttcggttttgcgtaaacaataagaaaggctcggcgagcaatgagttagttgacgtcgtttactctggccacctatctccgattcttgcctcttcgaaggtgggtacgacgcgataaagttatttgtttgccgcagaaacagtagtgtttgcggaagcaagtttaacaaataagaatggtggacggcggacacaaggagacaaccgtaagtgtgattgcgcggcaggataagcttagtacagtctgagcaacacgggtgtctgcttataaccggcttcactttcatatatacgtgaagatatatacttctctgtcccaccaatttataggtagtttggtttttttgtgtaccactcaaacatgttagaatgatttgactggatataattattttaggtgaggctcgcatcaggccaccgtaaaacggttggtgcgtgcgcttaatctacgttaggagcccaagacagcagaacctacagtcaagatgccaagaacagtcggcgcaaaggacatcacgccgggagtacgcgttgcggtggtggtcttcattgacacgttaagtaaggaaggccgcctcccctacgggacaatcgtgcgggccaagaagctattcaagctcagccgcgctgccgtcgagaccatctggggtcttcggggcgatccggtcgtgctggtgcagcctcggtagccgtgcccgcccaagccgacacgtctcagcacctaggaggtgggttagcgtgttgcgaccgtgccgctctgccagcgggaggctctgcgcgctctcgaggcggcatccgccatctcaagatccacgctgcataggcacctcaagtccaaggtcctgcggcacttcatctggagggtcaagccggcgcttacgggctcacacaagcttcagcggctgacgtgggctcttgcccaagtgcagcgcccaattggtaggagtttgcgttatttattattgatgttagtaattgaaaacattgtttgaaataattattaactaatattctccaaaggcggacttttgtatcgttttgatgctatgtatgatgtagttcataaagatgagaagtggttcaatatgtgcatggcgtcttcttgatactacttggctgctgacgaagcactactttaccgttcgtgttcaaagaaacgcaacatcagtaggtaatgtttctcgcagccgtaacaagacccaggtatgatttttcacgaaaaacatggtttgacggaaagaatgggatctggcccattgctgagcgcaccaagacaacaaaaacttccaaaaatcgagttgccggcacgctgattaccaagaatatcagcatgtcaagaaacgtacatagagatgctcaagggaaaaagtttttccagctgttcgtgcaaaatggccgggtatttttttatttcgaatgtacttttgatttatttatctgaacaaacttttttatttacgtatacaggtcccaagacttctgttattcgtgtccaacaggataacgcagacccgcatgtggaggaagatcatggtgaagccctcgccgctagtaaggaagatggctggaataccgaaatgttgtgccagccacctcgctctccagagtgtaatattcttgatttgaggattgttttaactctattcaagcgattcagtatcgacaaccaacaaaccagatggatgggctcatggaagcagtaggtaacgctttatacagtgttaaataccaaactattgagaaatgcttcctcacttcgcaaaaagtgttggaatgcattatcactaacgaaggaggcaatgattttcaagctccctcgagttcgtaagactgtcggtccgactggtctcggtccaatgtcacttgcaacgacagcgtcaactattgaaaatggcaacaaggcactgacgtctcagattcttaatcaatagagccatttttttaaatctgagcatttattctttaattctatacccaaaaccttgataagcattgattggataaaattatcgtgtgatttgaccgaaatcagtataacaggtactaaaaccttacatatttcagtgcctaatacggcgtgctccgcatgtttctggtgcgtgtgctattccgtacagagtcgccaagtcggagcaatcgcgtggtaacctttttgttcaatatcgctaattttccatggaattacaaaaaaacttattgctttcagagttgcgtttgtatttgtgttgttatttacttgttgaaaaccgttataacattgcaaaaaatacggttaatagcgccctaccataggctttacaacgtgggtaccctgggctttagcttgtttgtgtaggcgaacttatgatagaaaaacccaactgcctttaaattggtgggacagagaagtagaagcgattttgggctggacaatgttaggatacgaccaccgctaaagattgcgctcgcatgctttggcgcacactatgcaacagaaccaagcgagactaccctggaccgatggctcaaaatcgaccacaagagggccattatacggcggtcacccatccatgactcaagggcagctagctgtgtaggtggcgaagccgtataaaccccgcatcgaacccgctcgaaatgcagtcagcgacatcttgaaaaacgcaacaaaaaacattcgtgccgcgtgggcgacgacgaccagcaaaccctaccaacgtaacctcccctctgctagaaaaaaggcttgccgcctggatcatgaaccggaagagccgtaatatatgtttgtccaggaagttgataacgatgacgtgctgctgctagtttgtgacgagtgggatcccaacttcccgaacggctagccgacggcgttcatgcagcgctgcagacggcgccttcacgttcagaacggcgaagccacgtctgccgaccacgaagcagttcggatcggacggcagcagattcaacaggtaaccgatacatatgcatcacgggattattaagatatagatgaaacacgtttgggctacgctatggctccgactcgcttgatttgcaccaacaaaatgcgcggagtgaaaagaaaaaaaaacgcggagcgcgcttggcatgaccgcaaatgcttacgactctcatgcattccatagtatgtaccgtgggcagccaaaacctatgcttcaacaagaagtcggctaagggccggggctttaactacaaggctaacacaaaagcatggatgacaagagtcatctttcaggagtggtgttcgtgtcgttggcctagagatgcgagcagcggattgccctatcctgttgctcatcgactatgcgtcgtctcacgacattggcggtctagtactgactaacttaaccatgcggcacatgccgcccagcacaaccgcctttctccggcaataaatgctgacatcacagcgttgttcaaggcaaagtgaaaaaacgccaacttcgctacgtctacaaacagactgtgagcccggaatcatccagaaagacccaacccgatttgccagttccaagcaatgaagatgagcgacgcggtctggcgtggagaaaccagataggacacgatcaataattgcttccgctatatcggcgtctgctatctgggcaccaaggacaaaacagacgacgttacgacggagatgacgtgcaagttggtaagatcacgcttcgattatcaaccatgggagttagaactttcaaatcttatcacttcaataacacatgtgccttcagataatatgagtacccacgtctcggaagcgggcgcggggtatggccatttttaaggacgaaatacgcaaaatgtcctccataaaattagtcagcaccgtaaaatcacatgtgccaccaagatttaagtaggatatagatcaggtcagcataagcctgctaagtcacatttaactggagcattgttggtgtgtgtgaacaccacaccactgccacttggaaatgctgcccttttcgccataagcaccgcggtggaaggtgtcactctgcgtttcaaatactgacgcaaaataacttgtttttctttgggcggcggcaagaccccgcagattgtattggtgcaggcctgcacgctgtcttggtcgcttgggctttacgggtcgtacagtagaccttcgccgctgcttaagttgatcatgacggtaccagtgaacgcctcgaatattcactggaacgagaatttttccgacggacacacgaataagactctcattaagccaaacctcgctcgtactggcagtaccttacaccttcacgcttagaacggcagagttgccgcaagtcatatcgacccttacccccaagcgacttcgcatgatggcaagcattgtggcgtctcctagccagccatttgcagccgggtccagtaaagtaaccggtttaattgacagtaatcgttagccacctggttgtaaccacagtaaaagtagatacagtaccaatagcggaagttttcggaggcgcggaacgacttccatcgggtccttgggcacctgcaaattcttcgaacgggaacgttagcgagtttatccaacgaatcaccttgtcgataaactcgagggcgcgagccgcgcgatgccatcggcgcatgatactgagggagctagtagtaagacctccaacgttatccagggcagccaacacgccttcgtcacgtctccctaggtgctggcttcgggccgcggcgtcgtgacctacacacacgtggagtaaaactcatcggatgtagttagtggatctccttgggaggcgtgatcgaggttaggacctcgttttataagacacgccttgatacaagtcggttcgagcaaggtaataaacttggaagtcttccggacagtaatcgggttgtacgtagtatttcccgccaaatgtttttcgtagaaatgtaacgtcaccaggacggccactgcgatgacccgaccgtaactggaaccggtgacttgaatctggacacgtccatgcgggaggctccgcgcccaacttccatggacgtgcaatttatattgccattccacttgtcctcggcatcacgaccgctctcctactcgacatcatatgtggccttacgattttcagagctgtggttaatcgtgttctctttttactttaaggcttttgtggtgtagcgggatcggccaaaatctggttaaggcctgatcgagcttcccaccagcgcccagacaccgactaacggagccccccccaacgatccgtgatcggctgaacttgttctcaccttgtgtacccgtcggcgggctagatctgctctctcggggtttcgaagatgcagcacttggtgagatctagtgtcttggcgtgacgcggggatagttcgtggagcagcgcgggtatcttcgctctgcgtccgagtataagctccgatcgagggttgttcgctgtgctcggtcggcctggagtagatccaagtcctgtagtcgcctttccgggtgtgatccgtcctctcctgagttgcttgtcgcttcctatagcgggatcgaggttgatcgagagaagaaacgatcgccggtaagcactaatatccggtcgatcgaggacttgcacacaagagatagatcactaggctgaccaatgtattaatccagtcttaaccgtaccgctagttcactactcaaagtgtcgacgttgccgaggccaatgtagttcctgggacttggtgacttgagaggacttgtggtctttggtgcaaattctcttctgatttttgtttagctggtgtctctctaccgcttccatctcatctaccatcccacaactgaacaactactggattcttgtcctggcttcgcccccatgtgcttcccgtcttggccgatcggcgatcggcgatccagtccgcgattcacgatcagccctcgatcgacgatccaccatccacagtactcgatcgcgatcagtccacttcggtcttcagccgtcccactctacgatgtcgctcattgatcttgccctcgcgcatgacgtccttcgccttcgacacgcgctctttgcatcgcgccccctggatcagtgtgggacgaggcatcaccactctccatgtgtcgatcagctgtgatctacctggttccacaccccgcctacgtgcgagcatcatccaggtgcctcgatcgctcgtcgaaccttctcgatccccgcaatcccagtcttattcacgtcgcccttctctcgatcgtcgatccccttgattttttggccgatcggttatgccgcctttctcagagaacaattcttgttctcacgcttctccacactttggcttgggtgccatcatctacatcttcttcttcgcctaggttggcctcctccaattctgcaacatctccatctgggtctttagcatcagcaccttcgtcatcatcctcggcgtcgtctccttggcttctttgtcattcggcagcttcaagtgccacgtctccgcccactggagcgcgagccgtcaaagagcgctaagctgaaacgcgaataagcgtaaccaacattttatttttggacgttgcgcccatgtgtgtttcgtttcgcaacacaaacgccgggatgttttggccgtatcacaatatatccgccggatccaggttggctccatctataaaatatttccatagtaccgcaacactcgaaattcgtagggtttcagcctccgagtagcccctgcccctttcttccggtacgctctgtcgtcagaccctcgctcccttattcaggacagttgagcatccgacagcgtttttcctccacccgagcagcgtcgccttactttcttgctgcctcagagactccacaaccgggattcgcgtgccactccttaagcttctcaatcatctggcccaacgtccactggtggcatatgcgtttcttagaagacgaaacccatgcggggtgcggcagaaagatattgtttgtgtatggaggaaaaggggaagattttaagaacgaactggtttataattctcggaccgttccgctaccactaatcctaccggttataataccgttgcacaataactcgaccaccccacacgtcaagccgtatcgagtacagaaaaacaagatgctttgtagtgtgactttcctcctacatttgcgcctgaactcaatatggctcttcgacacgtaccgtacacctaaatcaattacgatacgcgtacttaacgtacagtagttgaatatagcgtatcgtagatagcctaatactaccatatcggactaaatagtactagaacttatactacccagtcgttactatcggaagaacggtaagtatgcggttgctgttatttccaagtttgcccttatcatggatagtcaattctgggtgttctgccagaagattggcgacgctgaagttaaagcgtacgtcttgcaacggcagaaccttacgctcaacgatcgtctaaggaatgacgagaaattcttacggagtcgtcgcggtaagcaaatgcgcttaaggattatgcgaaacagccaaaccgaactggatgatgacgacgatcttgatccacgtgatgaagttgagctgctacagatgtgtgttcgcgacaccacggcagatatgtgtggtcccagaatcggagcttctcaagcgtgccagaagtggataccgtcggagacttgaagtgacacgccaagcgcaaacagagatgacgcaccttaactaccgcaacactcgctatgctgaatttgctgcaaatatgtattgtggctttcaactattttgccgcccgatttgtcgtgttatcacggagtccgatttatataaaatggagctcctacatgatcggttagtccaatttagctatatctgacctgagttagtagcataaggctcagaggggaggcattcctagttctcctcacctctcatgacgcattagaactgcaagacattggggacaatagtacactgtatatggccacttcgtagcactatggccagctaaatcacctgtgtgatcatctacggccgctacaacctcgtgccacgccgatctgagagggccccagacatgttttcgcggcggtcccttttgccggcgaaaagcggtatttctggcccctgcttcgcaactcgcagcccccagacgcaaatctggccagatatagtttgcttcccacccacccccctcggcccctcctgctaaatcggagccctccagcaaatcgggcccgatatatcggatcttggaccacccgatttgccaaaacggatgaaatccacattaagtacttgcgtccgacgcaaacttcgagttagctaacttttcgagagcgcgggacttaggtctagccgccgtaggacccgttcggtcaaccgataacgccaggataaagcctaaacaaggatcgtaagaagcgtaggcgacttagttactctacggtattaactcggtctagttactatgaattcacccgctttaacctgaacatgaaatattttttttaagtccaagaaaaacgatcataccgggggtctttataagtgataatacaacaccagctgagcatgtacctgtacatgcacaattcaacttctaaagcagtacttaacaatggacaataaacggcataaaaactatcggagctgttatttcgaggaaacttggttctggagaatgattatgttttatgcaccgaaattagataagaatgtaacgattaacgagatgcaaaacaaaaccctaaaggtaaacacggtactgtcctagctcattacctacgagcgatttcaaaatttgagcggctttttggtgacggaaccaggttagtcgttagctagctaggatctgcatatgatgggagtgggcagcgtgacatgcctagtcgaagcaaagcctggagtcatcattggttattgggatcacaacagtgcacgtaaccacatcatttacattttagagcgtagcttctggagccatacacgaaatttcgaaattcgttagaaattagattccatcgcccatcaagcaggtaaacaggtcttttcaggtggcaagaatctgactagtggatgcgacgaatgcaagcaaaaggtgattgttttcggtgtgacttggacagctagcgggctgccctatctagaagcatttctccggtgttgttgcatttcgaagttcgaaattcgaacacaataaatcaacttaaacgtactccaacgtaatacacgtaaaatcaaaactaacgaaagacgcttaaatcttagtaagttaagctagcggatagcggcaaatagtttacctttctcaaattaaatacctcctttcaaatatgatataatttgctcaatatacaaagctattacacctaagccaattggtatatctagaaccagcaaatgttatgttaagagtagaatgttaacatcttcgtagtggctaagagacgtcttaacattagaaatcacatgatcaaggcttcataacactccttttaatttttttgtttacagtttacatgtaagtatttcctttgtcaaattcggcaagcaggatcctgttggtgttttcgttaacacgacacttgtcttcggtaccgtttgtcatttttgaaacttaacccaaaattaccgtaagtacctaaagaaaacatgtattttggtctaagttctgcttgctggggataacactgtccatctaacggcatgaaaggcgttgtggccggctctgcgcaacgtatgggtatctccatggtttgaacggttagagaagtctaatctatggattggatgtcttgttcgcaggaatgtaatatatatatatatatattgccaggctatgtgtgcgcgagatctggtaaattggctgctgtcaagcgaattctccaacttgcggtacctcaaagtaggtagagaacacggcattagttaacctgaacatgaaaagagttttaagtccaagaataatgtatacgagagacgtactatcaactattttatacattgtcaagtgcatatccagttccagctggcctcgctgcctcttgtttctgcgcagcagctcgaagcgctttactccgaccccgatacgccgatcggttaccttgaataggttgaacagccctcgagacgcaagcgcaaacacaccggggatgtaacaagtgttcttaagacgaatgtgccaaggttaccatttttgcttcacatccactctccacccaccagcgggcacgccataggcttccatccgtgcggcatgagcgctccctttagctgccacggacaggcgtttctgggtcgtattgacacgatagaattggagatttcgaggattccccgagccgcgcctgcgattggttggctcagaggctcactatgggagagggaggcagcgacacgtggcgtatgggaagagcggatcccggccggactcgcgttggcagtgtacaaggtttggtgaccccggatggagatgtccccaagagcggaccccggctggaaccaagtaccgaacgagacaaagcccaagcgagcgtaaaagtgcctccgactggaggccgcctgctcttggtgcactgtacaacgcaagaggagcccgaccggatcgagtgaagacccagaaaccgtgaagctgtccaagacatcccggacgtgaagcccaagtggagtgtgatcccgtttggagataatcacgaatcccggatggagatatcaagataccaagataccatcccagatgtgaagatccagtatacaaagtccaagacgtttccgaccgaccaagccgaccagccaagatctgttcggattccgtggaacattgaacttcgcttgcgtacccagtgatgattatacttgctggaagtatgctacgagggaccgcggacgattacgacgacaagaccatagtgaagacaagtcaagatggagtgcatgtaaagatcgacagaagatagccagacagacagacagagagaccacagataacagataaacagagttcgttttacctgcctggtgacaagtcgctttgtagctgcctacggaagcgcaccccgtaggaggaagacaagtggccaagccggaccgcgtcggggctagtgactgcgagcgcatgcagccggggacgcccgggagcgcatcaaggaagtaagctcggatggaacgtcgttgtcgtgaagttccagtaggcgtgctggatcgtcgtggcgccgacgccgtagctacacgcgtaggcaagacaactctccccttcggaaaagaagggttcgtgctaccccgtcggcgatagctaccatggaactgcctaccggatggagacgtgcccggaggaccatggggcatcaaggctgagagagattaacccgtggtgtccagctaccttgggggttgcctgcaggaagaacgatgcttgtgggactaaggggcggatgccgcgcccaggcggagatagttgaagttactttggagttgctcaccggaaggaccatacctgggggaccaagggactgatgctgcgaaacctggacgtacgggggaaaacacgacccataaaacccagaaaaactagaagataattggatgaataagccctaaacaaagagttcgttttgccaaggatcgcgcaagtgagttggagcagcctaccggacgtgcattcccggaggaccgactaagtctacgtgtgagggcccagcaactgtgacatctgggtcgagctcccgcaaccaagtccagtccaagttggggtgagtaccgggtgacaacccgaggttgatccatcccgtttcatttcctagttgcggttgagctcgtccagaccaggaaggccccgcatttcatattaccgattaccttgtcaccccggttggagtagccccgggtgggaagtattgatttaagagctctagtgtgacaggaggtatttgattgtgtttgtttccctccgtacttgggggtggtgcgcgtgagccaaaaccgtccgggattgaccagtatcccggagtccggctggagttgactggagtagtgaccgaccctttcacggtccaaaagaataaggaagggctacgtgtttgtatataactctgtatctgtttgtattgtttggttatctgagggctgtcagaggcgacgtccaggaaggttacgttctgccctgctacctagcgacctacaagtatcaagacaactcatccacggttgaagacccgtggttacgaagacaaacgaacccacaggcattgttcacaaggacacacgccaccccggttggagtgtacatctaggtgtactatctccggctagggtttgttctgggtgcaccccattcgggagtctacacccgggacgcgccaagcaatacacctgggtggtcaagcgttcacccgcctcgcctcagtattgtctttcgtagctttcgggcaacacgtacacgacggttttgtcatcgggcttctcgccaagcaaaaccttatcgatgcgcgtactaattgcagctcgtgaagctttccggtctgcttcagtgcacgcacacgacgcagtagcgttggatctgatactggttgttcagcaacggtgcgtgagttcatgctttcgcccgggtagctctggagaggttggtcgaggagtgcaacaatttccggtcgcgcttaaagtataattgcgcttgatcgcgccgttgtactgttcaacgaggttgtgcgtcgccgtgaatacagggagtgagttgaatacctgccagcgaagaaagcggccgtttagtcacttggtggtaaaataggtctcaatgatgctattgaggtatttctggaccaacattctgtcattgaagttcgtaagcgctcaagttccgctgcactcccagcaaaatgcatgtcaccaaggccttgcaggacacgtgtagcgagttccagtggaagtccattcgagcgttcgaacccctttgctgcgacgcgacagtagcccatcaatggtacaagctgggccgtcccagaacggtttatgtgcattgagtagagcgccatcggcgtcggtcattgcatacttcaccgcaacttgtccgcaaatcacagtagcgtagatgcgcttcaatgccgagaaggtttccgtgaaatgcgactccgtcagttgtgacgtgataaagacggcaacgacatgaaactggcacatacagtccaaacttcccatggccaaggatagagctggaaggtagcgtcgacatgtagcatgtaggtagtaggatctcggttgatgcgctctagcaggcgcttggtggtcacgcacacgataaaagggctgctgtcactaccgttgcttacgacgaatagaccgtcgcgattcgtcctccaaccgaacgtaaacgcatcgcgctagtcttcttgtccttagaaaccttttgccaatattctcgcccgcacgtcatcgacgtaatcgctgccaccgagatgcttcgtccggtagccttggacaaagtattgcacgcattgcagcggcagaatgttcgttttgttcagccgaaaccggcgaactaaagtacctcgaatacacacaggcttgtggttgtgggctgccatatctcttacgacctcctttataggcgcggtcaagcaagggcgcttcgcatggcggcggggtgagagatgagtcatcacgtcccacgcattcacaacgttgatcgagcagcattgctgcatcttgccacgccaggcgcagggggtaggataggctacatccttgcaggcttcacagccgcagcataggaagtgttcgcgcatgctgtgcggcatggagacagcgccaaggcggtacggggctagaccgcccttcatcattccaaaacgcttgaaggagtccagaagagtcagagtaacttcgaggagaaagccttcggcacggggcgtccagtcgatgttgcgggacatgaagtggggtgttcaggacgaagtagcaagtgttggagtttctgggaagattcagaagtaacttcatcgctgaggtagcatcctatttgctaaaatacgcgagttgtgataatgggattggctacaacgccgtggctacaaaccgagcattctacagtgaggcgcgaccgaatggtggcgcatatgttcttttgggcaccctacggtctttgtacagagttgggggctgaattaggttgcccgcagttagatttagacacgaaacgaattttcaggtgtttgggtgcgttgtcgcctttgcgaagccggctacatgtatagaagctacatattatctcagttttggtgatcaacttcgtggtgtcacggctacggttaactacatgccgcaccacggattctactggcagaagtcagctcctaaaccagctcggcgtcaaggaggctttgcatatgattgctttcacacgctgatgcttgttccgtgggtaggctgttagggttgcggaacccaccagttatccccgaggcgagaacagattccaagcgcttttcgtccacacaacaagctgctgacaactcgcggctttgagcttaaccgggatagtagggtggaattgcgcagttgctgcaggattcaacttacccaggtttttcacatcaagtccattagtggtttattcaacgaaatatggactggctgataggttgctgtgtacacggccagggcccataagctacgcatgtaatagttgcgcgagaatttaaatgttttgtcgtcggcactcggagagcctaccaagcagcaataaaaaggaggtatgcatgccttctcgattctaaaaatggtcaagcaaacttgcacagtgagatcgctgtttcgccacccggcattattgacatacacctgcacatccgtttgctgacgacgtagccccaccgcaattgtgccccgaagccatgttggagcaacgtttttcgtgagctagatctggaatcgcggaatctttggttttaaaatctatgcagggttcgtaccgctaccgtaccatattccataactacgagagtaattgggttttcatcttcccagggctcttcacccttccgacggatcatcggccgaactgcacaccgtttcgctataaccgtttgtatttaagatattggtaatgtgctgctacaataaaaaacaacatgggttaacatttgcttaactagcatacaaataaacctgtccgttttggaatttttcgaagcgtgaatgttctccttcgctttttgcaagatacgcaaagaaaaccacaaaacagtgatccaagcccaccatcattcgtttgtgaccagttaagttcttttatggtgcactttaacgattccttggctgaatagatacgctcagacatcctattctgatgttgcatcacgtgcgtacaatatatttgaatctgtcaaacataccacagtcgcaccttcccttagcaaaatatcgttcatttctgccggtcggccgcttggggccacccagcaggtcagatgtttcggcgttaatcctccattaattgtgttaaaacgaaggtctagcttgactttctgtttgatcaccattgggtccgcggtgattcccttgatggacttccaatgtttgagatcgtggtactgtagtcacagggttttcgccatgaacgcctgtaacagtcgtggtatcacgactgacacttccgctccgttgtcaggctttgcccaggccacggacacacggttcactaggcacggtagcttatggccaccttgtctcaggcgtgaagggtccgccatgagttcgataacaccgaccggtttacctgccttacggttcttgtcgtagagttccttcccttctgtcgcacccacaagggaacattgatctgaaatacatcatgggccaggtctccccttttaagcatttgcgagactgggctggtgtagacttctttgaagctttggggcgacggtaccgatacctgacctggcccgactgtggcgctgcccaccgtcggctgccggtggtgcgtctggcttcctccggcacccatcgtccgttgaatagctgattaacaatcacaaggccgacaatctggacctcaaccattccctgaattcacgggcttctttaacgactcgtgcatcgtgaatttccgctatttgatgaccgtcggtttgagggagtagacagtgcgttggatcaactaccttggggaataaagcttgttatcttacatcagggttaccggagaggaagtgagcgaggtcgcacacaggcttggtggggttccttcaccacaacaaattttcgatccgtcggcgagcgcaccaatgcaggccaacgcctgggagcacctgtagaccgtgttgataacgatgaccaaataggtgcatactcccagcccgttccaaaacttacgaccggttcaacgttttcctgtgatcttaaactattgaaagttttaaaactactgagcgattgggatacaatgcgcaagctttttaagaccagattcggaacacccgtgatgtgcacgatatggacgaagtcgggtcacttacaggcgtgctattggtgtacgccgctgtcccaaccactcagccccagtctgcgccgtacaaggagctgtagccgggcgagaagcagcacagcgttcccgatagcatgtttggccgatagcttctaggcttgtcgtatgtcaggatgtagcggttgaagttatagttgctggaaccaacaggcgactacaccacgaaaccatccgcgcccacacgaaaattctggaacagatcagagcgcagtacaatttcgagatgacctttggtggtgtcatcatagctaatatcgacggaaagaccctgagcgctaccatcctggtgcggaagggcgttgaaacgctggtaatcgtcgaaacaagcctactgtgaaagatgcaaaagattgagaggttttgggaggttgatcgagagcgggaaagtcaacgacgctacggtggcactgatttacgaagagaaagaacttttagtgctcgatcatcgtcatcttttgtgtgaccaattgcgacgatcaaaaggcgttactcgatggatcgggtgatagtccgatctgcagggacgttttaagacgtaagaagaaaatatagcggcaggataaagttggttgaatgaatacgtctcgaagatattgtgtcattgtgtcgcgcacgcttaaccttacaatatacagtttggtccacaattatagccgcataataaaagcgagctcttctgtaacactttaacccctcagcgcccaagctttttttacctgtttttttaattttacggtactcgcccaacatgttactcatgcagcatgttaaagtcgcgcaacacgtacttttactatattctcgtataagtccgacgccgggctgggtacaacaacaacatgaccatttcagcaaatcgctcctccacgttgtacctacagcatgtacatggggtagatagagaatgatggcgctcctcggatgagcgactagcggcctttttatccagagactggacgaggacagcctgaagtgcgtaaagcaaggtagtattcaatgtcgcttgtgcgaaatctacaacgcatcaaatgaatacacacaagaaccgcacgaaattgtaaccttcatcggccagcccaacattcatcatcaaacacttatcttcctactcagtgtcactaccttcgccggaacttccatctccttcgacgacgtcgctgctgctgctgtgtgcagcagcctcctcgctatcttcctcatcgttgctttggttctgacgcttgcggcttccggcggtcttgctagcatatccctctcgactttggaagtctcgcccgcaccgcggcttcgccgttccattttctcacttgtggtgccagatctggtaacagctcatggcgtttccaggatagcgttgtggccaaattttgttacatagatacatgctgcagataacagtagagtagtcagcaggttgctatacaattgcaaacaaccactcatcaacgtaccgagctttatctgacttgctgcaggcagcacagtagtacttcgtgacgcgacactctccaacccggcgctttagaacggagatgactttgtactgacgctgtcgacgtttgagtaccccattgacaaactggtactcagggcattcttggggctcgtggcccggtggtaacggaggaagcacatcaccagctgcaggctcgtgtggggaaggctacaagcaatcactttgttagctcacctccaacatgacatcaattcaacatgtatatgattgcatgcctcacaagaatacaacatgtagaacgtgcatgatgttgttggctttacaaccatacaacatgaacgtccgacagcatgtgcagccaccgccaacatacaacatgtatcacatacaacatggaaaaagaaacgtcttctggagcacttcgacgacggatctgatcttccacgctcggtccgaagcagccttggtatctgcgttattcgtgaagtgtagattggccatactgtgctcaaagcggttgcgagtcataaagtcgctatacgtcccacgcggaatcgcgcccacggcgttggtaccccaatgatcaccaaatcttcgccgatgaggattcaatattggcgcgatcaaaagaccgaccacttgcaggattcgatggggttcaacctcggggttttgggccttgcgttgcataaaccactccttggacttttttccgggggcttctggttgttgaacatgcgttcaacacgcgacgtcaggttctggacaaaatagcggtttgtttcttcagccactttcctacacagacttatcggcatgaagaaaaaaacagttttagcggagaatcggtcaaagcgaaaactttatcggtgggtccgtattccccgggaaacaaccctggatagtgctggtcaggcggaaagtggtcaggctctttatgttgtaagtacaccataaaacaagtttgaacatgtagtatcatacgtcatcatagtacaacaacaataattccgtaccgatcgtccaacctgattcccgcatctccgccatgttctcgtcgcttcgcgtaaactcggccatttccgcagcctccaggacgtccaatgacggtcctccgtgtcgccggcaacttctctcacttcgccagaagactcatcaccactttcatctccgctcgaagcatcgtttcctggctcgtagtcgatacttctcgaattcgtccactcatcggcatcattgtaaaagcatacctctgtttctgtctcgtcacagtccgagttcagcacttcgaatccgtcaccggttgctactggcgcagcagcaacaacaggaggcgactccgcttcaggaccggttgcacggggcggctcgactgctgcagcagcaatatgatgtggttacaccgtcgtaggagcagcagtaggtggcgattgcactgcaacagcaaaggaagccgaaccagaacagatataacaacaatcaatacaaaattgccatcatcattgctaacgcttgcctcatacatgtcctgttagatcagcattcggcgctggaggcgggggtggagtcaagccaacacagcaggagaagttcgaggtgtgggtggctgcaattttccaatagctacaggcgaagatgtgacccaaacacagcacaggttagcatttgctcacatgctagagatcatgatattgtacacatgctaggccaaacttgctggatgtacctgcatgacgtaccacatgatagattagaagatgtagtatcatccagcttgtaacatgtcgtacctcagtgatgatttcttcgctctcatgggcacggcgtccgtcgtcttcttccttctcttggctgcagcaatcacctccagttgcgccctcgcctctgctagtgctgcttcgccttgcttctccgcggccgcagacgtcgttcagtgttggagagctgcagcccgtcgctcttccttcttctttttccttggtaaggcgcgcagggcttggtttccgtggcttcttgggatgggtgggtttggaccttggttggtacagcttttcgcttcgccaggggagacgtcaatattcaatatgtcagaaatcgaagaccatgattggcttcggcttaatgagatctatccaaatccgctgtctgtgtgatgttttaaggtcctggggtaaatttggttacgcagtgtgtcacgaaaaagttcggaagcacgactatttgtggactacgaccaaatagcgtgaacggtataatcgccatcttctttgccgtccatcttcttgcgcgagaccagtcactcacttctttccagacccagcaagcgttttcgctgcaatagcccgctgcgtctacaacacacgctgtcttgggccctccatacgacgaatccttgccgacgggggatcgcagcgcttcgcgggaggtcgtgggtttagctgcaggcgctggttctggatcctggacgtccccgaagtcagcgtcagcctctctcgttcccgccaggtatgccgcgtgctgttggtggaggcgggctctgtcctctgtacaccggccatccagtcgctccataagcgctgatgctgccgccgcgtttctcgaaggagtgtgtgtgtggtggggggggggggcattctgatggcacgccttcttgtctttttggagaatgagcgcagagccactgattcagggagggctacgcgctgtttatatccgattggatgatctatctaacccaatccctgtgcattttcaagagcgtccgacttatgtggcaatttagcccaacttgtaacatgttgtacgtacaacatgttttttggtgtatgtacaacgagttggcgctgagggttaacatatctagcgtaaattaaacatctcgttggtgttgaataccaaacagaagtataaccacaagtccatggttctcttctaacgtaaattaccgaataataccccgggcactatttaatagtaccctctcaaaatcccaaaagtttactatgtataaccaaaaggttacatcactaccttagcaacttactcgtcgatcagagcagcatcatcaagagcgtcgtgcagctcgtccaggttaaagttgtccatgtcctcgaggtcgtcgccagcgccttcccagcctgtacagaattgctcaccgtacacgtcatgcttcgctacgtgccagtccagggagctgtctgcaaagccagcggcagagatcgagttgatgacagcgttgctgtcagtatcacgccacgccttcttaacccacagccaccgatggcatacgcgggttgccgaagcgagtgtactcgaccttgtcgctctccttccacgcattgatcttcatgtagagtaggtccttcaacgtcttgtagataccaatgtcgcctgcttgcagatagggcgtgagctccccgggaatgacgcacatgttgatcttgcgagccgcgcacttcgccttcacatccttggagatgtgagcgcgcgtcgaatcccaaaccagatgctttccttcttgcatgtcgaccagcgaaaaagccagatcaatccagcgcttgagcaacgcgctgtcaacccacgctcgcggctggtaggccccgtagacgccgccaattttggcaaaagttggtgaggctctgcctttccagatcaaaagaggtggaatttttctccctgtggccgatacagccaacaccgccgtaatccgcatggacgaaaaccccgtggagcgcaccacgacatggcgactgccggttatgtccaccgcctgattacgcgcatcttcgaagtacacggccgtttcatccatcaggatggtacggttcaagtccatggcggggacagcgttgcgtagaaacttcatgtaagtaaccgcgcgctacacgagggtctcgtccgtcagggtggtcgtcgccgcaaggagagcccgtagcggcgcataaagccggtgatccagtgcgaggaggctgcaaagccaccgaacacagcgtcgtcatcgtggtgagaggcatagatgaccctggccatgtggccaatccaggcgcgcgtgactttttccttctgtagcctcttggcaacaatctcgtcgtacagggcgtcctccatggtagccgatagggggcgacgaccaccgcctggaagccggctcatgcttgggtctgccgctaggagcttctcgcggtcacgccaccaccgccgcacgctgccaccatccagcttcaaaccctgcacacggaagtggctgatagctcgagtaggaacttggccgccttcgctctcgatccagcggaggacctgctgcttgcgccagttgctgatggggattcgtgaaggcattttgccgaatggggcgatattggcgtgctgcgactgcgtgcagacagcgttagcgaatggctggcgttgcgttttatagtgaaatgagtgtaacaagatggctggccaccagagcagggtagggtacgtgagttacagcaaggttactatcgggttacccttgggttactctcagggggtactattcgggtagagggtattaatcgtgaatttccgttactgaccacgaccaggaaatcgcaagctgcacttgcgaaaggtcatctaaaagagactgataaccgagtcaacctctaagcttcatttgatcaagtatacatagcgtgactgtaacaagtgcttaacggtgttcatgacaagcacgggttctgttagaccatgcatgccacgtttaccagctttcatgctttttttattatattatattgttgatttctaataactccatacattttccggttgaaggtattgatacgttttatcggcgttttggaatgcatcattgttgtcgtctgatcatttacttaagtatgcacgtcgcgatatgcaaactcatgcggtgtcgacggtacttagaattcaggcattttggctataatgttgtccaagactgtataatatacagtctggggaaaaatcatagacgcacccccgaaatacctgaatacttgtttgctctgttgtattataaaagagcaaacaagtacagtatagccaacagtatttagtcacattaaaaactagggctccgcgaaggctgggataggaggttttgggataaacgcttttcttactttttttacgatccacagtcatctcctgcggctgcgaagcaggcgcagcatctgcccggtcattcacctcaacggcgaagatgcaagatacgactagacaataattatacacagtaatgaaacgaaccttgctcgagatctagctcgtggagaaatgaaaatgcttgcatttgtatgctgctacagtcctgtagtagtccgttcgattcaatcattcactttacatcactccatccgattcgctgacccattgcggttcaaactgcccacgcatataaaccttttggaggcccagtgcggcaccggagtcgtactggtgtgatgggtatcctaccggttcaacctgcccacgcatataaaccttttggaggcccagtgcggcaccggggtcgtactggtttctggaaatgtaccagttgggtgtcaagcgaggtcattgtttgacttgacgtaccacggatataatcctatttggtctgcgatagcagcactaacgttgcttcctatcccagtaaaatcatgcaacgtatatttattgtccagagttactacgcgggcaacgcgcaccagactaatgacaacgatattaatgtcctcacacccgggaaatgattaaaaggctctgccttaaacccgtcagcgacgagcaacaaatgagcgcacagatttcttcgggcagcagcgcgtcgggaatagatacccgtctaaactgcaacaaattcaaataaaaaatgggtaacaacgaattctctaaaccttaaatcaggagtaccgacagcacgtactcgaagaattacttgtgcatcgcaaatgcttgtgtaagcacgacttctttttatttataaatccttgtcgtctcgagctgcttggtccttttttccgaagtgcgccggtggtcaatatcgtgtctttagaatcaaccacagttataaatcaccagtgcactagatcagtttatcagaccattcaaagaatcactaaagcaacaacaaacaatactactcacacatatcacggcgcacatcgcgtttattatctgacagcaacagcagcatccacaagttcaatcgatcaaaaaggtacaccgatatagaaagcaacccacaacgggcagcacagggtcagcaccaaagtacattgtaccgcataggtcgcaccagcgatgtccacggaacgggccgaaaccaaaaatgaatgaaagttgaagcacggtgtgtgtggtcgcaccgtgtcaatcagtagaactagaacactacagaaagtcgatagaactgcgcagaccccttttcgtcaacttatccccagcatacatttcgctatcactacccaatttacgctcttggtgagttctgacgctgcggcagccacccccaccctttttgaggggtatactttgctgtcgtggttgcagagcttgccgaccgcgcatcttggtagtgactactgttgggttcaatgtcttgtacgctttagatgaaccgcggtgcagttcgacgagaatacgcgcaagtcggcgctgtccgtgttcgtcttctgacgaggtctgcagccccaacggacagctggcgacgctgcacgcacgaattcacttcctcatggtggcgccgaggagctgccgcagatgtgcacgcgcacgaacagcgaggacttcaatgcgggccttggcatggtactgtagccaagcatcactcccgccgtcgggtgcggtgactgctttgttcgacgcttcataatgcgggttggccttgccaatgcactgttagaatggcttcaaaaatgcatggaattggttttactgcatcgatatactccatccgttcctgtagcgcgaatcgcctcaatcgcagattcctgtttgcactcaccaattctacctgcataatattattgtggcaaccctttgtatcgaacaaacctgttattttagatgcatgttcgcgaaacgatagctatgcgtaggctgggtgggatagctaaataacttagtgtgagcatcttcaccgcgaccgcgcagtcactatcgctataaccaaagcagcaattcaaaagcacagcgcacacgatttaggcgcgccgcacttgcgacgtacccgtcgcccacgcctatcaggatttattttttgtttatgagcttttcgcccgtcgaccattatcatcttttacgggcgcaaacttttgtttctgtattcctttagtagccacctcagcaacgtagtgctaaatccacttgagtgtaagggggggttaaagaggtgacggatcgtttggcccgtacttggtgcgtatgttcggttgaaggtgcagcactgaaaacgcgcgttgtactttcttacctgtcaagtactagggcttcgcgggaatccaaccttcttatttggactaatattgctctgattagagcacttaagaccactttgcacctagcactcggtaggcactttgcagcggacttacggatcagtttagggaggtagtgtcccgtttttaatcaattccaaagttcgcgccaatttgcagtgcaaagctgcagaggcgtgaagagcattctgcactctggtccttgtagccagcgatgctacgcgatctatgtgtggaggacatcgttgtcgacgacgtacccgccatccgagagtgctgcgcagcgcggctgatgcgctacttacttcgctcctatccgcccctgaccgcagtcgtgatcgcgttacaatggcgcgacaacgagcgcgttcttcggcctgccgacacacgcgtacttcttacgttgattgagcgctggggtgcaaagaaggcgtggagaatggcggtgttgtccggcttcttcctgcatcgagacctgcctgtgctgcctatgatggcgttcgacctaaatgcgatgtcagataacgattgcagaagccgctttggctttgatcacgctgggatcaagaacctggtcgttttgttacagcttccagccgtactcaccacgccagctccgcatggcgacagattttctgctgtagaaggtaagtgttttgtgcttgtatcctgtagtataatagtacgctgagttgcttttgcgcaggaatctgcctcctcctcgaccgtttgagctacccacggtccctgcttgatttgagacaacgctacgatcgctttccttctgctctgagcagaattactacatgcatggttcatctggtcctcggggcagcaaaatcccagatcctgttttccgatacatcgacgccaacacggatggagccgtacgtccgtgcgtttcggcgctgaggtgtcccggagctacttcgcgtctggaggacagacgctggagacccccgatgataagtaaaagtgctttcctagattcagttttatgatactcaaaatggatgatcagctagggttaattgtgcattgctacaggtgcgcagacggccgtcgcgtggacggctacatcctacgagcttctaatctgctagcgttcctgaatgggaatcgtgatattgtgcagaatcgcaacgttgtcttcggcgattcagcttatcccaacaacaacgtcatggtgaccatgtttagaggccggaatttaccagcgtgggcttcggctttcaacaagcgcatggctaaggtgcgcgtcaacgttgagtggggatatgctcaagtcacgcaaaatctcgcgttcgttgactgggatcgccagcttcgcatcgagtcgatgccagttgaagcaatctggttgctttcagtgttttttacgaattgcctgacgtgccactggggtcgcaatcaaatatcggactacttcaacagtttcccaccaacgatggaagagtatttagatggagtccatgttaacgttgattaagctaatccagtgcgccattagcgcaatcactacttctgtctaccctttagcatcagttccagcttcttaaactttagctcgaactgtttttcgaactcatctcgtcgctgatctctttccgcagctcgctctcgcatttcagcttgaaatgtttcttgttgtgttgccattctcttcagctccaagtcaatcgactgctggcgctcttcacgcgaaagctttacgtcttcacgttgcagctcaagacgcgcatactaagctcaacatctgctgcaaaccgtttctcctcgagcgctagctgaggtgattcaaggtctgttctgctggataaatcttcctccagcatattttcgatgcgctgctggtgtcgaggggttctacgctggcgttgggtacggccgccttggtcattgtcggcttcctcacctggaacatctacaaaattttaagagcagcatcattaataaccctttccattacgatgtctatctcataatagttaccttcaataacgccgtcactgctgagtcgctgctgtcttcctccgagctccgtgatacgatcaccaatgacgctgcgggcgacattttcgcggtgtcggagaccggcttggcgcagcatctcctctcgcttgcgcttttcagttgttgcttcagccatctctacgaaatcccgtcgctcttcaaccatcaggttcagcttttcacggatgcgctcctgtttaaacatcatttcgtttagcctacgtgcgtatcatatccgcacgttgcaatttgatgttacctcgattagggtgcggtcatactcgcgacctgtttcagcgtcaagggcattctcttcaggcccatgggcgtcaagcatctcgtccacatactttttcatggtacgcgggttagcggtcagcccccaaacacttttaaggtactccacggagcgctcaagccgttccccatttgttccgtagggcgctgtgtgcacctcgttggcgtagtagctatcgagcacagcctccggtgcctcaaagttcgatgaccaattttttattggtttcaattttctagcatggttgacctgctgctgggcatttagcggtgattcgtggctttcagttggctggcgatgctcttcaggaacgtgctgctgccttgcagcacctccatcaccacgaggatcttcatcaccagagaataaattcgtcgaaacacttgatgaactgccatcacttctggcaggcgacgcgacaccgctggtggtttgtccagccccgtccaaagacgaagtaggcactctgatagagcgagcacctgctggtcccttacgaggtgccacaggctttcgaaaaggaggaggcgaatcgctatcgctccagtgcttcacgagtagaccaaccgtagatggccgatcgttgatactctgaacatcctggtcgtctgctcgggtggcttcgtcgccagtgaggttgcgtgtcttgtttgaatccatgttggcgcgacttgggacagctcgcggttgaggcaccttgtcgttgcttgcttgcgctcgcttcttggctctggtgcgcgatggcttccccttgtgtccttggcccggcgactcatcgcacgccgccgcccgcttgcgtttgcttgccgagcgctgcttctgttttcccgccatcgtgtgcgttgtgaagggcagacgtagctgccacgtgcgggtttgctcaagcgatctctccaacacgacacgacgtagtggttctgatgggcacgtcgcttggcgctgtgagcggctccttggctgcgttgctctttctgcacttggtctgcgtgtcgacggctttcagttgccttggcttagtgcgcgggctgcactactgattgtgttgtgagagctttgggcgcatgccgctcccgctgcacagttgccttcaaagttggaggcaaagctggggtttccgctacaaggaatttgacaatgcggtggggtttgtactgcaaagttggtcgctaagttcgaaattcgtttaggtacgaattttggctgcaaagtggctacagagtgcaaggtgcaaagtgctcttaagtgctctattagctcaatattttttaaccagatcttggccctcacttttccttacgctgatctcgtcagatatccagccccccccctcgagtcgagcgtaagatgaaggcggccttcatagacaagcagctagaagaagctatcgaccgcgtcctcgcaggagagaacagaggttaggataactcaaagtattgtattactgagtaatacaatttcggtattaatacagattgtattaatacttatactcgctttttgggcgaatgtataaggataattgaagtaatactactcctcagaattggtaataccagtaatatattacggttatacttccagaagccgggccaacttgactccaaacttgctactattcgtggatggtataagtgtaaattagtaatctttatatatattgtggccgccaagcgttttgtccgctcggtttttcacgctctcaagggatttggcttcaccaaatcctggttgatatatatgtaaatccttcagaacacctacggacaactgggcattctggtcgattcatatatatatatcgaccagggttagcctaagtgaccccgtatcaatccgcatgcatggctgatgatacgcacgtggtgcatttagaacatgcgcgcgcccactaatatgtttccacgaccgccaaggccttcacttgccccggtatgatttgacttctagattgttttttctttacttgaaattagatgaacggtatgagagctcactgggcgtgcgtggcaacatgaaaaaagcctttcgataccgtttaaacggtgcttctaactattgaccctaactacattagcagcgttcgaataagaagtggtcctagcatttcacagtcccgttttacctcaaagggagagtgcaggggtctgggtgtgcagccccagcacacgcaccgcaagataaatggtggtctgtgaaaatgttgattaatttttattaggatcagtcgcaagtcttatttgttttcttagtaaagcttaccttattatggcactgtacattcgttcgctcgcggttgaggctgcagtcgaggctaccgggctcggaatgtgcgcatttacagaagctgatgctaatattgctaccctaacacacaatcctatcgatacgctacattaacacccttaaatacctcgaagcatctcctgaggtgaggtcttattcttagacgtaacaggatctttgagaccccaaatgtatagttgaggttcgtggagatgctcttactcctgaatgaagatgaacagatatgaaggattaattagacgaggaattccaatcgctccttaactctgaaataaatttcagagaacaattggtatcaccgctgtagttggcggccataaagatctatttagataagtattgttgtgctttgcacgcagaataccgtccgttttagtcagcttatccagacttcatcatagctctaaatcagactttggttactcagacttcgcaccaaaacagactttatgttcgcaaccgaatactaaactgtcataatgaaaactacccctttgcatttagatagaagtttctttggcctttggcttctggcctctgcggcgcctacactttcctcattcaacccgatcgcatacacgacgggtcgcgcacaaggcccgaggccacgtcgagcttaggtagtacccggtgctgccgtcaccaccctcgccgcagtagatatcaacgttgcatcgggtgtctcccatactcggctagtataggcagcccttcactacatcaccatccgagtataaaaccaatatgcctatcactatactatagcagagcaatgcacagcttagcacgccgcttctccgagtggatgaggcacagcgcggccttacacttccaatttgagggctctctgtataatgccaagattatgatcatgccgaaccgcagggcagcatgccttgccagtgaagtcacctttggttcctggctgcctcttcaacataaggaccgtcgtatgaatactatgaaggtcttcaacgccattcggatcgtcaagtgataggaacgcttcagacgttaaactattccttgggctcagtccttccgagcgattcgcacggagataattcacagcatagactcgccactggcgaagccgagctaatgtgggccacataaatttgtactagtataaagtattacctaaagtattaatacaaactgtattaatactgatactagatttctacacgaaagtattgtataacagatatttataccggacccccagtagggccagtaatacttataccgtgatttgtcgattatcctaacctctgggagagaagctcgcagccgtggccgactctcgggctcgcgtaagacagctgatgcgagccagcagatcctgcgcaagcgcgatttgcttatcaccccgccacgcgaaaaaaagcaaagacaagcaatggtgcaggagctgcactccaagcgcgtgacaacaatggcgccgaagtgcctgcagtggagccgctgttcatcattgagagcgcgacggtttgagtttggtatgacactttgtgtgggatcgcgtcggtccaacatctggtcagtgcgtcatacctcaacggcgaagatgcaagatacgacttggcagtaattatacacagtaatgaaaagaaccttgctcgagatctgcttatagctagtagagaaatgaaaatacttgcctgtgtatgctactagggtagtccgtccgcttcaatcattcgctttacttcactccatatatgttactgactcataccggttcaaactgcccacgcatataaaccttttggagggcccagtgcggcgccggggtcgtaccggtgtgatgggtatcctaccggttcaaactgcacagtcaagaggggtcatctttgacgtgacgtaccacggatataatcctatttggtctgcgatagcagcactaacgttgcttcctatcccagtataaatgatacatgtagcgttgtagcatcgctactcaaatattggtgtcgtcatcgacgatttcgcatgaggtgctgctggcgggtcatgaattggtaaaccacgttagttgtgattcgcggataagatattcttctgtctgtagtagcactgctgccggtgacaagcaccaattatcgacctgcagccggcagccatatctgtgtgatttctcctatctattgttgataagcttagcatgtaagttgtaagttccagcactgttgaatcaatgctgaggactgcaacgcaacaacttcgcaatgaatgtttgtttcaaattgaggaattgatcacacgctttctacagatgaaaagtgttgtagaccagatccatatccgctctacctcttgccaaaaacaattgggtggactcgcagcatgagactcttttcactagtcgattctaggtggtcttgcctttgcaagcctcttctgtgccaccttcgctgacggtgcgcactgcgatgctctgccatataagtctttatattaatagcatacagtatgcatgtatgcatgtacagctgaaaacggtgggcctcaatacagctgagtcagtgctggggaggatcgcgacaaaataaatgtaagagagttgccttcaacttcaagatcactcgtacctagccgaaattcacaacttcaaacagaactttacaaaaagccgggacgcttttcttgagagcgaacgataaggctatcgaggaagtgaagccagcagactcgtttatagtacgagaaagcgaagccttcaacggtcatctcagccttcatgcaagaaagagagaatgttgcctatcagtttggccaaccacgagaaaatgtgtgcggtccgcagatagcgtaatctgaaaatataggttgccacctgagcaacttgttcgcagtacctagtaagcattgctaaacagcaacagcagagcacctggttgctgttagcaccccctcgtcacttttaacagcttgctgtgacgcacatttcaaagtatgtatctagctgcttgaacggtcgatggtccgtatattcaaagcacgcgacggatttttctacgtgttttccttgcaccgagctgggacctgcggttgatgcaagcggaaacaattgcactatcgactacatgtacttggttggcgagcacggagccgattggcctacggtcgtcggggactgcacgctgtattagcgtgcagtcgctaatagcggcggcaaggacgattggcagatgtcccggatctgcatctgtttctagattcttctaggtcgattttcgtccaatggaactttcatttctcagaactcgaggcttgactgcgttccactatgcccaactgaacctttgtcggacctagacgcgggtagggttttcatactcaaagctaaataaaactggggacgcgtggaaaggtcgtgagggatagagggggagtcgagaagcccccgaaaccgacgcattcatcttttcgctgggttggcggcaagcaagctaggcgactgcggggcgtccgagctacaggcatctgagaaagaacgaaagcgggccactccccgcttactcccaagactcgacacaagacacacaagacacttcagacagccatgcagcaggagcgagagagcgcggagctgtgcctgaacggctgcggcttcttcggcgcgcccggcagcggcggcatgtgctccgtgtgctggaagaagaccatgtcggaccgccaggcggcggcggcgcagtccccgcgcgcggcggagcagaaggtggacgaggctgccaagctggagacggcggtgcccgccgagaccgcggacaaccagagcgtggcccccagggacgtggcggcggccgaggaggaaaggccggcggaaaagctcgtgcagaagaacaagaagcgctgctgggagtgcaagaagaaggtgggcctcacggccatcgagtgccgctgcggctacgtgttctgcagcagccaccggtacgcggaccagcacaactgcagcttcgacttcaaggcggcggaccgcgccgagctggcgcgtcgcaacccgggcggcggccagttcggcaagctggagaagctgtaagcggttctgctaagagagagagggccaggaggttgccaggattcgacggtgcgcgatcagtcaagtgctgacttcgcgggccagcggcgcggggaacgactctttgcgcccgaatcgacgaccgagtggctggagacggatgacgagcggacgcgctggggccaggcgagcggcgcgttgcttggtggatgtaatattaggacggaggcccgaagcgccagccagcgaccgaacgcggcccacgagagagagactcccagagattcgcttagcccagcttttcgccatccatgcagtttttctttgctacactctttttttttcttaggaatggaacttgattttcttattcgtccgttatctgctgtacgtggaggaaggagcgcccccaatgtcgttgggtcgagcgactggatctttcgccaccacgtcgcagaaagccgaagttgccgtgaggagctttcaggtccgacatataccgtagtaacagggacactcggcgccattatacacgtagcctggctcaacagctttcgattgttagacatgttacactacggaatggcctgatagttgggagctggcaccttgtccgcgtcttggagctcgcgcagcttgcgcgagtacagcttgagctcgaggaagcaccagcgcttgacgggctcaggcagggcgcggtaaagcaccggcggcagcggcaccagcggactcgtcgagcgcttgtactcgaggtagtccgggtccagcccgaagcgctcgtcgtagcgctcctccgccagcggcacgcccgagaggaacatgagcacgaggaaggtgaagacggggctaaggcagctcacgtagtagaaccacgtctcgccgccgtcgccgccgaagttggcgctggccagcaccgtcacccccacccagcacaggatttcgccgaagtagttggggtggcgcgagtacttccacacgcccgagcgcagcagcttgcccttgttcttggggtcctcgttgaaggccgacttggaggcgtcggcggcgtactccaccgccatgccgacggcccacacgacgatccccacgacgtctctcgcctcgccgaagctgccgtccacctgctcgccgctcgagttggccagcaccaccgggagggagaccaggaagacccagaggatctggaacacccagaagccgaggaaagcgaggcagttggcgcgcatctcgtcgaagcgctcgtccttgccgcgcttgagcacgcgcagtagcaggaacgagccgagccgcagcgcccacgccacctgcatgcacgtggccacaatggcgcgcgtgtcgtacacgtcttgaagtacgagcgacagcaccgccagcacgatgaagttgagcgcgccggccaggtccgtcaccttgtcgaactggcacgtgtaggccacagcgaagaagctgcactgcatcaggaccgtcacgcccacgcagatgagcagcatgatgccgccggagaccaagggctcgtccatagtgtcgaggtgcgtgtcgggcagaaggaatagataagctcaagataagacaacttggacactgccgagattactacaagtcggtcggagaccgaaatgcctgctgagaccttggtgaacacggtcgaagcgctacgaaagtaggaatagtaggaatgtttgtatgcagacgtaaaaaggcaagttcgtgggtcaagcactgcttgacaagcagcggatcaagtttaggcaggtgtggctctggttgcgacgctgcttgtattcatacttacgcttcaaggtgagaaagcttcgtgcagagagagcgggatggccagccgacgccaaaaatattcctagggaagtctaccggcttgccgtcactccccagccatatcgcttcgcttccgtcactccttgaccaggatatacaccgcgtgaatgatcccggggatatacctagtgtggcatgcagcagcagttgcagttgcaggcagcactcgtcattagatttaacgccaactcgaaacaactagtagtaaaagacaggaggcaatgctacaactgcgacaacgcaacgcacccgagcagtgtgagcaagcagttgatagcgaagtccttgttgcagccaacttggaagaacacgccgagcggtggcagcaggatcgagcagatcaagcgcggacagtctccccacgtaatggccatcgcgtttgcagtctcttgttggtcgtgagtcgtgacgagaagaaggccaattgcaatgtgcaccaccacacaccaagctcttcaaccgtccaacgaccgtgtagtgggcgctgcgtagtgggcgcttcccatccatccgggacacggagcagaatcatccgcaaccagcggcgcggcaacggcggcaactttttgtcccattctaaacagcttcaaccacgttctaaatctgtactcccagactggccacgcggtttccgcccaatcacatcgcccaaaagacaatcatgccatcggacctggagctcgcggcgacgcgcgtgaacctgtgcctgggcgccgagcgccagctcctcgcgcgcaacgcccagaagcgccgcctgcccgtgaccatcgtcaccggcttcctgggcgcgggcaagacgtcgctgctgcagcacgtgctgcagcacaagctcaacctgcgcgtggcctgcgccgtgagcgacctggcggccatcaacgtggacgcgctgctcgtgggcggccagctgacggccggcggcaacaagctcttccagctgcgggccgaccccaacagcagcctggccgccttcaaggacgccgtgtggcaggtgctcaacgacgacagcgacggcgatgcggcgctgggcagcgtggactacctcgtgatggagacgagcggcaccacggacccgacgcagctggtggcggccgtgcaggagaagttcggcaagatgacgcgcgcgcggctggactcggtggtgacggtggtggacggagacgcagtggcccaagacgccgccaatggagtggggccctgtgcagtggctattagacagctccagtgtgccgacgtggtgctgctgaacaaggtggacctcatggatgaggacaagctgcaggctgcgaggcgagtcgtacagaagtacgcgccctgtgcgcgcgtgtacgagacggatcatggccaagtgtacttgccgcacgtgctggacattgccccacccgaggatgtgtttaatggcggagtgagccatgagaaggtcgaagcgcaatggaacacagggttgagtgcgttgaacggcgcggtgactcccgctccgagccgtttgcgtgtggatagagggtcggaagtggcggtgaagcaggaggtaaacacgccgtcgcaggcatttgcctctgtggcgtatgaacggacagcgcctacatcgctggcagcagttcacgactggatccagcatcatttgccgaaaggcacgctgcgtgctaagggggttatgtatattgctgagctgccgaaatatcgcttcgtggtacagctgagcgggaagcggcgactggaggtggaaaatgctggcgcttggcaatcgacgcccaagacgcagtttgtcgtgattggcctcaacaaccccagctcaagtaacggagagcactttgacgaggtccaagctctcaaaggtctagagacgtgcctatcgaggtcagtgcacgatttggatagcggagtcgagtctaccagtgccacctgtcttgcgaagttggaagctgacgagcgctttgagactctggcctcgtccggccaagctacgacggtggtgttccgccttacgtgccccacctcgacgctggacgagacgatgcttcgtcaccaccatcacgtggacatgaacgagttgaccaagcggctggtgcgggaggtgaacgcctcgggcggcggctctctcctgctctacgctttaaatctgagtcccgacgatgtcgagggagaccaagtgtacgccgttgcctctgtcgttggtccggcgtctgttctgagcatgtggagcgagctcgcctctcgcgctgagttgatcgtcatcgaggtgaagaagaagctcgctggctgcctctgcgggttttagacattagtccaatcgagtgcattatcaatggagtgatccaacaacttcaacatgagtggtaacttcaattttgattctgcttatctttcccttgccagtgcaggcaatcagcctgcaatgtcttgctcgggtattgcagttaactcacgcagatgacgtacacggcgtggataatcccgggaacgtaactacatgtagcacaagtcaaagcagcactatcagtcaccaccacgaattcagttttaacttaaaacttacccgaacagcgtcagcagcccattgatcgccaggtccttgttgcaaccggtttgcaggaagacgccgagcggcggtagcagcaccgcgcagatcaagcgcgcagtcttgtcccagtcgaagtcggaagcgctcgacgaggagcggcgctcgtcgccctcgaaccaggtgtcggcgtcgtctacgacgtgccccatttctcactagaagctcaagatggaaactgcaactggcacaaagatctctgactcggatccgacagttatcgttgacgtggagtgacgaggctcaactggcgagagacaaaaactgaagaaaaggagaataagaccgaacaatgtcggcctctatattaacggttggaatccgtgtcaaaagaccagaaacctcctcggatatcaggaaagagaacgtcgagcacctgacggctaggtgttgccgttgtccaccctcctcttcaatgcacgtcctccaccttgcaactcgcaagtcagacactgtgtcacaccgccactgtgcgagagagcgagccgataaagactcgcactcctcttcaatgcacgggtggcaacacaagtgtctaaccacgaggagcaagtgctaaacgccactgtacgagagtgtagactcgagctgagttggccgcccggctgcacgacgctcttgtccccccatccacgtcgaaagcgcgtttctcatagcttttttctgggtattcacgcgcgccgactgaaggaggccgctgccgcttgccacggacgagcacagagagaacagcgccacattttttacttcaatgtggcgcctgcctattccttgattagaatgtagacagcgtggatgacgccgggaatgtagctgttgagatgcaaaggcaacaggcaacacggttaggtggtgtttaacgcgacaggggtggagtgcaacagagacgtacccgagcacggtgagcaggcagttgatggccaggtccttggtgcagccgacctggaagaacacgccgacgggcggaatgatgaccgagcagatcaggcgagggatgtctccgcaggtaatcggcatcttagcgttggtagctggtgggggacttcttcacgcgaggcaaaatcgaaagtgggaaatgtgtcgtgccgctgctggacggatacccaagtcggcgtgggtgacaacctatctatccgatctctcttggtttcactatgctgccggcttcaagggaagggggatgggggccaactgcaaaatgatggctcgcgcgggattggcgaaaaatggcttcgaaaagcggcggggccaatcaacgatcgcggtgtaaggcgccgctgacgagattctcttgggtgtcacatcaaacaacgatggcaatggtttgccaagggcaacactgcctgcaacttgcaggctgcaagtgagtgctccttatcgcctttgccatctgattcatcgtcggaaaatgcgcgcaaccacgtggggcgctgccgtgcgggaccgcggcttgagacagcgcggcaatgctactggaaattgattgcctctgcgcgattagactgcgttctgtgtcccgtcatcgggactaaaacagggactatttcacaaatcaggcgggtgggtacacccgcgggtctcgcgattggctggcgaatatcagggaatacctctgtccccattggttagaaatttgaggtggatttctcaccaatgacatcacgcaaattttgacatggatacggctgcgagaagatcgccaacctggacttggtcattgaagacaccaacatgcactgcagagacttgtacagtagtctaagactccacaaacccttgggtttcagctacttagagttaatgggaattattattcactggcaattatgtccttcctactgtccagcctgccaggctctacccttgcacaaaacttgcactttagaccgtgccgtagggggccttcttgttggccagcagggcctcgtcgtcctcctcgtcgacccacttgtcgccgccctcgcgctccatcttgatagcgagcagcgccgcgccgcacgtgttggaaaagatgaagagcgggcccacgagcgggatcatctgcagcagcagcatctggaagccgaagctcgagtactggaacttgcgctggctgatccagcgctgctgctgcttgaagcccaggcccttgaggtcgaagtagtacaggtgcgactcccaggccatgaaggtgctgtgcagccacgcgtacacgatgctgccgatgaccgggatcaggtgcagcggcagcgacacgatgagcaggattacgtggaagatggcgtccaggcggaagaaggacgtgcacacgcgcacaacggccgactcctgcgtgtcgcggtccaccagcgcggcgtagcccttctcgcgcagcacgtaggcgaagaccttgtccttgaagtactcgagcaccaggaacgcgtacagcagcgtgaccaggaagatctcgacgatcacgaagatgacggcgaagatccacgacagcacggagggcaggcccttctcggccatccagctctcctgcggacgcagcgtccaggcgaagagcaggaacacggagaagatgctgaaggccagcgtcagcagcagcgggaacgccgcctgcttccacaggtgcgggtggcccaggaagtacgccacgcccttcaacgcatagaacggcattgtcttgtcttaggaggtgtgcactacagccgccgaattggagaatggctgacgcacgccacgctgtcagcgttcgctgaagagctgaacgagtggagagcgtcgagaccattctggaaccagccgtgcgtgggtgagagatcaaattgattcggagctgctggacgcaggatactttttggctggatactttcgcttgatcacgctccaaaaatgatttgcatgtcaagagggagcaatcgaatcagattcgggctcacacgtcacagatgccccctgcgcgttgaacgttccgctagactgtgacgctcgcgctgctgaccagcgtgtcctcctcatcgacgtgcttgctgctgctgctactgtgtcgctccagttcctcagccagcagcgcggcgccgcaagtgttggtgaagatgaagagcgggccagcgcacggaaccatctccagcagcagcgcggacatgccaaagtggctgtactgcactttgtagcggctcacccagcggcgctgctgtctcaagccaaagtccttgagctcgaagtagaagcggcggtactcccaggccagcacgccgccatgcagccaggcatacacgatgctgccgaagaccggagcggcatcgagaggagcttgagcgcgcagctcgacaggatgtacgacgtgcattccgacacaacagtcgaatggcgtctacggccttcatccagcagggtgctgaggccgcggtctctcaacacgaaggcgaagatcttgtcttggaagtcgtcgacgaacacggcaccgtagacgacggtggacgcaaagatctcggctacaacgatgcagatggtcaggatcgtggcgaactgctccgggacgttcttgtcgtcgagccaatcttgttgtcgcgagaacgtgtggaagaagaggaagtacgtggcagccacgccgaacaatactgtgagaagaagcgggaacgccacttgcttccaaagcgcgggacggaagacaaagtaagcgattcctcggagcgcgtacgctaccatttgtgtctgcggtttaaacatgaagaccggcttgccggatcgattggcctggaagcgcacagcgtggttgatgcgacgctgtccaacacggatgcagtccagtaaacaggtttgcggctggagcgcaagaagcatcgatagaagagcatcgactcgatgtcatcgggtcatgaaatgaacaagttacttctccattaccattttcggtacctcctgctgcgatcgtcttcctcactcaagttacttggaagtgcttccgtagggcggcacgtacgcaccgagcttgttgacgagcggcaccttgtccatctcaatgctcttctccttcttgctctctttgcccttgccgccccagctgttcttgcgccgctcctgcttctccagttccttctcaatgctcgcagcgaacagtgcagctccagccgcattcgtgaacatgaagatggcgccggcaatggggatcatctcgagcagcatagcccccattccgaaggccgagtactggagcttccgcgcagcgacgatctccttctgctgctcgaagtcgaaggccttcatctcgaagtagtacagatgcgcctcccaggccatgagcgtgccgttgagccacgcgtacgtgatgttgcccagcaccgggatcatgttgagtggcagcgtgatgaccagcagcccgagacgcagcatcacgctcacccggcagcaggacgtgagcacgcgcaaaaagggcgagtggcgctcctcattctccaccagctcccggtacccgcgctcgatcaagacgtgcgcgaagatcttgtccttgaaccactcgaggcacacgaggccgtagacgaccgtgacgatgaacacctcgatgatcacgaagatgacggctatcagccacgcgaagaaggtcgagaggcccgcgtcgtacagcgcgcgctcctgccgatgcagcgtgaaggtgaagagcgtgacagccacgccgaacgccacggccaccgtcagcagcacggggcagagcgtcaggcgccagaggtgccggtcgccgaggaagtagaggatgccgcgcagtgggtaggtcgacatgggaggctgcgggtcggatgtcaaatgaccagaccagggtgatttgaaggggtggctggaatgcccgctggacagcggcacccaagtaagtggaggtgatggtttcttttagcgcttacgtacatgcagggcttctgctcactatcaactacacaagcgagcgatacgactcggtctcttcttgatgcggcacttgcggatgcttggcagcctcctccctctcgatgctggaggcgaagagcgctgcgcccactgtgttggtgaacatgaagacagctccgatacccggcaccatctccagcagcaacgcctgcatgccgaaaagcgtgtactgcatgctgcgctcgttgatgagcgcttgctgctgctcgaacgagtagttcttgagctcgaagtagaagaagtgatactcccacgccacgagctgcccgttgagccacgcgtacgtggcgttgcccaccacgggcacgacgtttagcggcacggagaccaccagcagcccgaggcgcagcagcacactcacgcgacagcaactggtgcagatgcggaggcacgacgcgtgcctgcgcttgttgctcacgagctcctcgtggccttgctggcgcatgacgaactcgaacaccttgtcttggtagcaggccaggcagatcacgctgtagaccatgacgatcacgaagctctccacgaggcacagcatgatagccatcacccacgcgagtccctcgggcactccagcgtcgtagagcgcttgctcctgcgggtacatggcggctcccagcagcacaatgaccgtcgtcatgcccacgaccaccgtcaggagcacggggcaaatggtcattcgccatagtgcagggtgcgccaagaagtaggccagaccctgagccacgtacgtccacatgcttgagctgagactcggcgaactggaaagtgcactgcgtgagcggatacttttttgcgatcgggcgaagagcgatatatcgggccagaaaacgagatggctgcagcgccgctcgtggtggctgcctccgtcccaatgcacagacgtcctcgttgaatggcgctctgcagctgtagcctacagagctctcttcattatctacaatagatactttctacacgatgcctccggacggcgcgtagccgttgctgtacgcgttggcgttgttgttgttgttgctgttttggttccagttgggctgcacgccccctccctgcagtcctccctgcagcgccccacgctcgcgttcctcctcctccaagtgcgcagcgagcagcgcggcccccaccgtgttggtgaagacgaagagcgagccgacgccggggatcatctccatgaggagcgcctgcatgccaaaggagctgtactgcactttgtgctcgttgatgaaggtcttctgctggccgtacgagaagttcttgaactcgaagtagagcaaatggtactcccaggccaggatggtgccgttgagccacgcgtagatgatggagccgatgatcgggatcaggttgagcggcagcgtcacgatgagcagcacgagacgcagccagaggctcacgcggcagcaggagcggcaggcgcgcgcgcagctggcgtggcgctcctcgtcctccaccatgtccttgaagccgcgcgccaccatgacctgctcgaagatcttgtcctggtagcagcccatgatgacgaggttgtagatgagcgtgaccaggaagatctccacgagcaccagcatgacggccagcagccacgagagccacgaggtcacgcccgcgtcctccagaccctcagcctgcggcaccagcgcgacggagaaaagcaccacgacggatgtgatggccaccacgagcgtcagcagcagcgggcacagcgtcgtgagccacagccgcgggtgcgtgacgaagtaggccaggccctgcacgacgtaggtggacattgcttcggctgcggaaggtggtggatatatatatgtggaggggagtgcagtgctggacttcggcgaggaggagcgaagggaagcaaacagtgaactgatgacatgggttgttgagaccggcgtgcgattggctgaaaagggaggtgtgtgtggagagcagcggatttcaccgaatacaagaccctcatcttgatatggctacattttgccagttggaattttcggaattgtgggtacaccggtacagcataaaaatgctgtcgttgctgaagacttcagcctgaagtcacttcgtacgtagcggtccgatgactgcaaggcttttagttgtcatcgtcgcgctcaccaccgcaggtatgcaggttcgacctagtattcgcgctctggatgggacgacctaggactcacattgctccactatttcttgttgcagtcgacgctgcaagcgatgcgtctcagtgcgccaccgtcaagacatgctacatgggcggtgatgtgtccgtgccctgcgccgtgaacgaggaagactgccctccgtgcatgatcttcgacagcaactcctgctacgtgagggcgagcggctcgtgtccatttggcgccgactgcacaggcgtcttcttctccggttcaagcggtagcggctccagcaactccaccactgtcagcagcagcacgcagggctcaaccacgtcagccaccgcagatacgacctctcaggccgggtcatttctctcccaggctaacagtgcgggtggaccatcgtccgaaactgaggcgacggactctgccgacagcggctcgagcacggtcttgatagtcgccatcctcggtgtcgccgtagtcatcgttgtcttgggtgtggtcgtgcggaagctcttcctgcgcgctcgagctgcgagcgagcagaacgccgacgaggaggaaataccgtcgccgctcgccacagagacgactgctagcttctcgagcaacggcacctcacgcgacgcgggcgccgtagtcgcacgtagcgcaatagggaccgacctgagcgagtcgaagcccgtgtccgtgtaggtagtttcgtatagggccctctaaaccatccagtcaaggaccggtcagcccggcaggtacccgaataaactgtgtgtcatgaacgcgttgtgcgttgtcgttcgacacgtcgaccatcatttgactctctgagcaaagtgtcgttaggtatgcatgccgaaagcacgatctgcaacttgcagactgcaagcagcgcttggcaagcacacacaccgaaagctgcggtcggatcagaatttgtgtatctcgctgcgaccagaccggaacattgaaatccatcaccaggatggcaaggccactggtgtcaggcccattgcctctacatcaaatcaagcaccgagctgcttgtcatgccgcggagaccgcagggacaagaacatcctgcagtccctgttcggagtcacccacagtgcgtctgtggccatgcaggctctcgccttgcacttgctggtaccggtctcttctgccgttacgtctccgcgccagccgactttagaccaatcaccagcgcttttaaagagaaattgtgcataaacgctgcgctaactggcttgcgagccccggcggcggccaatgggcgcgcgcggattcgagccagacggacgagcgtgcgaacgggtataggctggcaaagcgggactcccagaggctcccccgacgagctccagtgtactaaccgcagtcagtcgcagcccaccacctcgcggccagctccattcgcgctggcatcgtcgtgcgtaccaaccagaaccaccacagcaacgaggcctccgcgcaccacagctgagagagccccacacaaaacaggaaataaagccgggattcacaggtcggcaacaggcaaacagcccaaaagcaacaggcaacaagcaactcgagtggttagagagaggggagattctctaacctgaaccagatttcaccgaacgacgatgcaaacttcgtggctcgtcgtcgctgccgcggcacttgccggtacgttttagcaccatactcaagtccgccataacgtgtcggataccgacagtgtcggaatgatgcgctaaatgatctctaactcacatgtgtatacaccaccggcagcttccggcagctccgtcagcgccgctagatccgtcttcgccgccagcacgtcgcagtgctcgtccgtcgagacgtgctacgagggcggcgcgtcctccactccatgcaccgtgtccactggcggctgcccgccctgcatcaccttctcggacgacggctgctacgtcaaggtggatggctcctgccccttcggcgtggactgctcgtccgtctggggatcgtccaccaccacgtcgagcggcagctccacgtcgtccacgacctctaccaccacgagctccggcagcacgacgagcggcaccaccacgacgtccagcacgacgtcggataccgacacgaccggcactgccggcacgtcgtccacctcgggtaccggcactaccggcactgccggcacttcgtccggctccacgacatccagcgcgtccggcagttccggcacctccgccggtgactcgagcagctccggctcggacatgagcgtcgtgttcgccatcatcggcgccgctatcggcgtcatcgctgttgccgtcattttcctaacgctcgttcgacgctccaaggccgcgcacgaggacgaggacgacgacatggccaacacgccgccggccttcgccaagaacccggtggtgcaggcgccgcacagcaccacgggcgccacgacgtacgccagctacggcggcgccaaccggcctgccggcatgggttccggcactggcggcgagatcggtctggacatgagcaagagcggcggtgtgtccatgaacgccgtgagctactacaaccagcagccgccgcagaactcggccgcgccgtcgccgcgcgtggccggccgcgccatcccgtcgcagcctgtcggtggcatgggccggtcgcacggcagcaacccgaacttcgccgcgtcgggagggttcggcgtcacgagcggcctgggcgcgtcgggtgtcggcatggcgagtcaggcaccgccggcacagatgcagcacatgcccatgggcggcgtggcgccgtccccgcacacgcggagagagtcgtacgagttctaaccggccgtcggttagattgcagtaggttcaagtcgatcgttgtacagagacactggaaggaaggtgagagcactcattttggctcgggacgtgtattcaatacgggtttcttgtgacggaacgagccggtcttctgttgttttaccttatctatgcagtagacaggaagctccgttggaaggtttgaacgagatgtcaattctatcgctgtgtattatttgtacttacgaattcagctacctacctcttgtagttagttgcgacttatgccagtccgtacgcgctgttcagaagatcaatggggttttgaggtgtgacgtcgccccaccgactgacggagcagatgccgttggccttttccttttgggcgtccgacgacgtgaggcagaaggccgagccgtacaagtgcatcttggtcaagacctgcgttttggtccagtcgggcagcaccgccaccggggtgcgttccaagctcaagtctccgatcttgacggtcgggtcgatgttggccggaagctcagtgatcggaacgccgtccagcgtcagttgcggcaggaacgtgttcgcgggtacggctgccagcgttggaagcgaggtgatcatgggattgccggcgagcgacaaggagagcaccggcagctggaacgtctcggcggggacgaacatgaggtagccgtactcgaagccgactcgcgcgatgggcttgcgcgtagctccgccccacttggtgcccaggtcagtcggcacggtcaccaaggtcgtcatgaagaactgcaggttcaccaacgtatagggcagcacgcccatgaggccctcggggaaggctgcgagcttcacgttgatgaggacgatgctcttgaggcgtgggtggaattcctgaacgagcgcagcgtcgctgccccacgcgtacagggccgagttgaagacgtggacactgtggagctgcgggtacgtctggatgatgctcggcaccacgagcgcggggcagttgacaaagttcaggctgccgagcgcctccgggtcgaagttgaacgccgccatggtctcgttcgtgggggacacggccttctgcgccgcgcagtcgaacacgaacgcgagacacgaagttttggagctgaaccacggccgagtggccgagaagcaacccgtcggcatggtcttgtgttgagactgcgccttgaggtggaaggccaggatgaggatgccccagaggatgatgcctagcttgacgagggcaaacggccacgcacatccggggttggtcgtcagagttcctgcctgggtgtgttctgccgttcgggactctcccaaggcttttgtggaggtaccagcttccaacagagcagtgtttgaggcgccgtcaggggtatccaacgtctccaccacgacgttctggttatggtcgaccttcgctgtgccgcagttgttcggtgcgaccttgtcgtctcgacgtccgatgaccccttcaagcatcacgagcgacacgaaggtgcagatcagcggcagaagccttgagatgaagtcccccacggtcgtggcgaacatcatcctgttctccggggcgagcactgccagaaaggccgggtcgtagaccattttggtggcgaagacgggcttctccatggtgaagacgtcggcgtactggatgaagagcagagactgcatgaccttggccaggaacgtgcagagcacgaagctggtgaacagcgataacgcgcggctcagcgcgatgcacttgcggagcaggatctgcgtcaacggcgtcaaccagcacgcgaggatcaggatggccgcgttgaggctattgaagcccacgcgcggcacccacttgctggcctggaacgcctggaacgagagacacccgatagcgaccatctcacgagctgcgaacgccaagtcgaaggcccagacccacttgctcgagttgcagtcgcccgacttggagcattggagaacgaggcgcttgctgcggatcgacaggtacaagatgcgcagagtttggatcacgtgcagtgctgcgactgccaggtagacggcaccgaaggccttgaagtgcttgaagcccgtgtcggaccacagtggggcgtacgacgcgttctccgttgtcgtcatggcgaagtaggttcctgctgtcacgacgaggtacaggatgcaagccgcgtggaaaccaagcatcaccagccacaccgggtagaacgcgaggggagggaggcccaacacggccgactggggcccgcacgacccgcctggcgtcgtttttgccatagctcgaggttgtcggaaggctgttgctgctgctgcagtgtttttgcgtgcggggagggcgagacttgaaatgtggagactgtggcggaacactgcagagccgacagcgccatcctgttgaggctgggtcagaatggagaagcaagtgagggctttgggtctgaggcgacaagacagtgagagcagacagccaaattggacgtcacgtgccgactgtttcgttcactcaaggacgggtgcttatcaatagctgcaacgccacgtgacaagatcgactggatggctttcttgtcggcacttggcaggcatcaaagctcgatttagcttgaaggcgccagcataacggtgtcttggtgtcattgatttagccaacaaggctcgttgtacagcgtacaaggtccctcaacctttcagggaaggtgaagattatttatccacgactgcgcgacagagacgtcgtgacgcagtcaaattgcatcaactccaaccacccccgccctgtatgctattgctatgctggctagcaggggttagctcacttccagttacgattccttaactaattgacttttatgacgatctatctggctgactccagcacaacacgatgatctctgctgctccttcactgatgaccgcttttttttagatagaagggggccttcttcaggcgttgacggcctccaggcttttccaagtggcgcgtgctgtgttcgggtactcgatacgcctctgccccttgaaagttgcgtagctggccgtctcgtgtagcgcaaccgggacttattagatcgagttaatgtaccgaaagcatttatttaaagacaacattcacatcaaattcccacgaactattttcatatgcgctgggcaggatgaacgaccagacttgatacgtcatttacgagttaaatttactgatgaggagcaaacatgctcaagcgatgaaaccactcgtttatctaattctatcggagagcatcctacccgacttcctctcttgtcgaattgtgccagttcgcaattctctaacattagcctttcgtccgattgagaaccctcgttcctactaaacccagagacctccgcggtaatgtcaacttctccgtcgatcaagaagcgacagatcgcgaaatggagacgcaaaccactcgccgtcaggatgtggaacttggccaacaactcgtacaaaatgaaggcgaaggacgagagccacgaggaaatgatgcagcggttccagctccgaagactgtcgagtgatcgcgggagtccgtcgaaattcgggcgtgggaagaacctcgtgattgataaagccacggggatcaagcgtcgaaagactcgacgacttacgctccagcggctcttacggaaattcaccagctccaagtcacgtcgcaaagctctacgaggactgacgtcgcccatcacgcccacgagctggacgtctacggtacacggcatcgtgttgttcatggtctaccacttccagctgctctacctgccgttctcccccagctactacccgaacggccccgtccactcgacgttagctcagttcgctcttgagacggtgtttctggtggatctgctgctcaacttcaacacggctttcgtccggcagggggtgctcatcacgtctcgcagtgagatagcgcagaacatctgcaagtggttcgccttcgacttgttgtcggctttacctcttcaggcaattcactgcgttttaagccgctctttggatggaaccaactcgagtatccatggggtgcagctcacgctcatggggcttcgactgctccgcgtcacgatcttcgagcgaggcgtcctgctcagccgcgtgatgcgcgtggccaaccacatcgctgaatggctccgatactcgcgatactctcatttactcggaatcgcgcagctcatgtggcttgtgctgctcattgcccactacatggcgtgcttctggcatgtcgtgaccacggaaagcaacgccaacgccaacgccaacggcgctctgagtcaaaagcaatcggtactggagcagtacgtagcggactactattacgccgtcagccttattcagggacaaggcggctcctttggaacgtggggtgagaacttgtactcttcggtcgccatcatcgtcggctccgtcatcctcgccatcgtcttcggcaacgtcgccatgctcgtctccaacttcaacgccaacaccaccaactaccaccgcaagatggaggccgtctacgccaccatggacaagctcgcctgccgctcaagctccgcgagcgcgtgaacgagtactacacccacgtgtggctcgagtacgaggcgctggacggcaacatcaacaagttccagcaggaactgacgcacacgctgcgcatcgagatcggcctgtacaagttcatgaacctggtggtgaagatcccgttctgggaggactgcacgcccgacttcttgacgcagatcgtgctgagtctcggggtgcgcgtgtacatgccggacgactacgtggtgcgtcgcagagagatcggcagcgagatgatgatgatcaacctgggatactgcaaactctccaagcccatgaagcacaacgaagacaaaccatcgagaggcccgacagtagccgacttcagtgacgatgcggagaagcccctgttgatgccggaggatctgggctcacccgagcagcaggaggcggaagaaggcagtgatgatgacgagtgggatgacacgagctcggacgaggactcggatgacgatttatccagtgatccgttcgggtctcccgcagcaattcggcgcatgtcgggctcagtgtttgaacttcagtgcggagacggtgataactccatggctgagatcaagacagatcggccacgaagacacagcaacccgagcagtgttgagattctggaccggcccaagaagttccgcgtgtatctcaacccagggacagcgttcggggaaatgagtctgctcatgaactacaagcgccaggcgaacgttcgacccgtgacgttcgtcgagatgtgcgtcttggatcgctgtacctttcagaggatcatctcgcggtaccctgaagaccgacggcgtgtactcacccggatgctccagagctgcatcgagaagaaggagatcccgttcccgtgggaaaacatcatcgaagcagtctgcgctaagcgccgagtctctgggaagaaggacatctcgcgcgccagtgtgattgccactatgactgcggctgaggcggctcggattctggtcgaggccatcgacgtgaatgttccagacgacaccatcaagtacggcttccagagcttcgaccagcagttcgtaaacgaaccagctctgcgtcacgctcattcggtgggggccaagattcgagaggcgctgcaacgcactcatagtggcttgagggagacgctgcagcgtaccaacagcggcctcagagagccattgcagcgctcgaacagcgggctgccggatacgttgctgcgcgcgaacagtggtctgagagaaccactgcagcgatccaacagcggcgtggtcccgtttcgcacgtactcgcgccgaaattccagcgcagacagcggcagaagctcttccacggccgaattgactgagccggagtcggacacatcgggagtgtccgctcaaagcaccggcagtacggagaagaccttggaaagcgtgatgcggctcatgcacacgttggtggagaatatctctcgactgcaacaagacgtgaccgagctgaaagcgcgaggggccagcttcggaggctgctgctgcaacaggtcggagggtataggacaacactcacagggtctcaagacgcgtcggtcgctctcggactcgacagggacccacttcgacagtattctaggcttggccacccacgaccaacagcgccaacccgtggtgcgcaagacggaagcttctgtggctgatgcagcagtccaacacgaagctcaaccggctcgtcggcccagattctcccgcctgccgtgaggggtcaagttcctcgaaaagaggtgagactatggccaggcgcgacagcagcaacctcgatgcttgtcggggaatcatctacagcggacgctccagtcagcgcccgagccagtacgaacttaaacgagggaactcgaccatgaaagtcacgcctcgagtcgatctcccagccggtggaagtgccgaaatggaggactcaccggcccaacagatcgtcgtggacccgtacgctgaaccccagccaggaaaactctccactcgatcgaaatccggtcgtcagtccacactcgcggacatgctctggaaacgcagcaacacgaacgtggatctgcttcgacgcagctctgccagcaagatgcaccagaagctcaaatctcgccatagtctgccggcgggggttgcagtcaccgccaccaacactgagagcgagatgccaccgattccagacgaagccgatggccccgcagagacgtcccaactcgaagctccttcgagcccaccaactctcgcatcgtgaatacatgcccccaagttcccgcggatcagaaagacaggcgaaccccgacccaagatgcatgaagatagagggatagcccccaacatgctacagtacttcgactgatagcaaatgttcagggccatcataggaattgccacgcactgcgccttattcctctttgggcagacatctgcctgtatcggatgaagctggccagaccccctccatatatataccataaactactcagcacgccaagatggaggaacagagtccccactatttctggcattcgtgtttcgctgtcgaagttctctccaagtctatcagtagattatccagcagagctctgtctatcatcaaaggacctcccgcaagtcaactgatcagcacgaaatgaaggttcgttctcggtcctcgcatccagtttccagacgcccacccgtggctaagcgcccaggcgtgagctccatcctcacgcgccaaaactcgacgagaaacttgtacaagatggaggagaaggccgcgacacacgacgccatgatgcagcgcttccatctccgaaaatgtccagcacgttggggtttccgtccaaattcggtcgcgctaacgaggttgtgatcgacaaggccatcggcagcaagccccagtggacccgtcggttttcgcttcgacgttcgctgcggtcgtttacgggcatcaaggcgagacgacacgcgctccagacgttaatctccccaatcacgcccaaaagctggacctcgacagtgcacggcatcgtcatgctcgccgtctaccacctccaactcatttaccttccgttctcgcccagctattaccaagacggctcgctggggacgacagtcatcatgatactgtttgagggcgtgtttctgctcgatctgctgctcaattttaatactgcgtacgtcgagcagggagttctcgtcacgtctcggaggaaaatcgcagagaattacgtccacaagtggttcgtcttcgacgtactctcagctttgccactccaagcgacattctgcttcgccactggttcagttcactcgacacacgccgctcgtcaaggaacgcaagccacgctcatggtgctcaggcttctccgcgttactttgctggaaaagggcgtactattgagtcgcgtcatgcgcgttgcccatcgcttggcagccagaccggtagtcgatcacgcgcgcagagacaacgctgtcggtgcgccactcaattcgccgaagtcggagcttgtcgtcgttcctttagtggcagacggcgacaagttcgccgaccgctaccctgccaacctatccagtcgatccaaggctgctcgtaaccagacactcgccgacatgctgtggaagcgaagcaatacgaacggcgacttgctgaaacacacggatgaggagcgaaacgcttcgagactgcggcgccaggtccgtccacgccacagtatgccgacagaacttgtagcggaacgtgcgtcctccggctttgacaactctcgagacgatttcaacttcgctgcagtgggcgaccacccgccccacgtcaccaaaaatcgtctcgatacactcaagtagaacgcatgccatatctactatgaattcattatgacaatgaatgaaaccacctgagagtttgcccgcttcatccatctcactgcgtgaaagggttcgcgaatactgatgggactgctagcgccttcttcactggcttcttcacgcccggtttcacccctccaccaaagctaaacccgactttagcggtacccgtcggcttcgcctgcttctcagtgtcactcttcacagctgcagctacagcacgaggctccttatctgccgccgccttggcctgagcagcgattctcctctgcagcataagctcttcctgttgcagctccttcctccgcttggcactctgctcctcctcggtccccacccgtcgcttctgttgctgctgcagctccctcagccgcttggtgtggtggtggtcgtacgagctcaggtggctctccatctccgtcaccgtcttgtactgcttgcggcagtcggagcagtagaaggccgcctgcatgctcttaacctcggccttgagctgctcctgcttggcgcctctggcctcgcgctcagccacttgctctgcggtttcttccacttccgcgtccagtttgcgccgctcgctggtcgccaactgcgtcaccttgtcgtactcctcctacataggaataaaatgccaatagttttcccactcgagacagtaaaaaccgcagtaatttacgggtttcagggtgctagcacacccaccgctttgcccaggccgagacacacgaggttttccttcatcttgacgggctccacgatgccttgctcgtgtctgcccaggccggagcccgagcgccagcccatcttcaccagcagacggtagccacggttcgacgcgtccagcgcgcgctccgccccgggggcgaacgcagcgtcggaggtgtgcgcaccgtcgcccatgacacgagaggtggggagattggtttctgtacacaaattgtacacaacgaaagcgttcgggtccgacttggactgagcgctttgctgccctgccgtcctccttgatggcaggggattgtggcagctcgtacgtcgtatgaaacaaacccagcgaggaattgcattccctgaagtgtgttgtgttgccgcgcttgtacagtgcctgcaccactgctcaactaatatcaggatacgtcgcgcggtcagagcaaatgcgcttaatacttggtaatacacaatcagcgctcttcaagccgccggtcgagcaatcgaccacgaaaaactacttgccagctaacctaagtagcgtacctatgagccatacataacctgacatgagaatattaaagagttgatatgatggaaatactacagtactgtaagtcttgggggatatacactgtgaatcgcggccatgtgtacatgaagtagtgagagagacggtagtctattgaaccttagctactaagtactgtagcctccttaaatgtgtagtttgtgtgttatcaactgcgatgactcatcgatgacatgccccctctcagctgtttcgtgctggtcggacccaaatatattttgccggtcggagcctaatttacttacgggttttcaaggtagggtcttcacgggcatgtcagcattgacacaggatggtagaagacctcgtggaaggataccgtgccgcacgtgctcagcattcagaagaagcaccacccaagtacgcaagcttgccactagcgtcgcgaagcaatgcagatgaagaccctggcatcgagcttttcctgcgctcgcacgtggagaacctggtttggatcgctgtcccacgacgtagacgtccgctgtctaccgtactgtggaggtctcgacggcgacacgccaagatgcggctgggaagctcttacagtagtggcgtcttcgttccgtccagggatggccagcaacgaactcagcgtgcaaagggagatgggcgccctaacggaagtgatgatgccgcgcgtccatgctgcagaacccgggtgggtgatgatgcatgtaaggtggcgcacactcgtttgaatcttgcgcggcgacggcaagactgcccaatacttacacgggaggaggacgcgacgccagtctccttgtcaccagttgctgtggtgattcaccacagcaacagggctggtaaaacctgtcgattttttgaaatggaattaggtttttggtttaccttggtttaaaccaatagaaccaagttttaatgcaaatactactcttcactactgagttcttggtcattctcgtaactatcgccgttttcgcgcttgtagttgtggttggccttgatgtaaagaagcttttcgattttcggtgcactcagcgcatttctaagcttgttgtggatgaagcttctagtcgaaaacgtgcgctcggatgcagcactcgaagcgactaagctgaacattgcagtacacttggaaagcagtcagctcgacgctcatatttttgcttcgtgtggtgtcacgagtgatggagctggtatcagacgcaggaaagtcgacgataatatcttcatatcgatcgtatgtgtcaggaaccattccgcatccgacataccgaggatcaagcatgtacgcgataccgtgagcgccggtgcaaacgaagtcggagcggtgactggaccttttcaccaagtactgcgtttccttctgggaaaagccactgagctcccggactttatccggaaacttcacgaatgcatcgtacacttccgacaacggaacagcgtcactctggaaaagagtgagtttcggatcaattaggttgagaatgctgagagacttgttcaggttgggaatgtagtcttccaccgtaacaaccgccttgatttgctcgcgtttagctcgttgctccgcagtccccgttgatgtaaaatcacgactcgttcgttaccagcgcatgcaactctttctccgacttcagaagcgaatcgaaacaagctttttaagagccccatcttgtttcacagggcagtgcgagtttgttcgtaccgctttcggtctgatacgcctctaactctgctttaagcacgtggtgctttttcacgaacttcacaattttcttacatgatgccgcaaactccaatagatattagacaccttttgctcacgtattttacggattctgctgcctccctgagtttcgtaaattgtaaaattgccaacgacactttttgctcacgtatattcaattaggtacgaatatcaatcttcgacagggaatcgaggccagcagcgtggttaagtaccacgcgggctttccagctctagttgatggcccctggcgctaggatcaagcgtttacactatagctggagtcgtccgaggtggcgagaggaacaccactggtgattgttgtacttgttggtgaaattgaacctgagtgtattgatgcagtttaaacaagctaggagctgtctcctagccttgaccctagtgtttgtaacgtgactggtgctcgtacgctagctcctggtaaccggccatgtcctttttgtagtccttccactttggcgcacgtcacagatcgctctgctgacagtcttccccacgttgggacttgaagggcacaacacgtcgtatgtggacggtctccatgtgcttgcccttgttgaggaccagcgtaccgttcgtgcgcaccgctacaacgttgtggggtacactaaacagcggcgccattttggcctgtggtcctgcatcgtttcgcaacagcaccttgtctccagaccaatcatccttcgtgttgatcgtctgcgtgcgcatcttctcaccaatcactctgtgcaagcgctcgatgatcccgtttgcctggggtttgcgagttgtagtcggtatggcatggatgccaaagctttcgagcagctcgaagaactctttcttgaactcggtcccctggtcgtaaatgacacgcacagggcgtgggttgtggcagagccagaagcgatcaaacacaaatgcagcatcgtcacttgatgcatcatcgactggctgaatctccgttagtcgagtgcttgtgtcgatcatcgttaatgcacggaatttattctttccatacggctcgatcgagtcaatggccacctcaaaccatggccgcaccacgactgtcttggcgggcaacttaccgtacttgactatcgggtgcttgctctttgtgcacgcaagatagttgcgcacgtattgcacgatgtgggcttccatgcccttccaccagagtgaagtcttcatagtctggtacatggcagtgcctcctggatgcatgagccactcatgataggctctcataacgggctcctgcaggtgggctggcactacgatgcagctgctcttcggttccactcgcaactttactccattgatctccttcggcaccccaccgaggcccaccacactctcctgggcttgggcgagctggcggagactcaacgagaatagcaccgcattgtccgtttcagctgcgctcacttggacagccgcttcacccttccccaggtcgggacccgcttcgccaggcaaccgcaacaacgcgtccgcgacgacgttgtttcacccttgatgtagtgaaggcgggggccgaactcctcaatttcgaggcgccagcgcatcatctgaatgttgttgaacgtcccgtaggtcaggttcaagtggtccgtgtggatatggagctcttgacccaaaagcatcgtccgatattcacgtagcagcagcaggatactgagtagctcgaggcgattggcagggtatttgcgctgagactcattgtacttcttgctccagaacgctagagggcggtcgtgctgagtaatgactgcgccgagctgataacccgaggcatcagtgtagatgtgaaacggagcgccgtaggtagggaacgcgagctccaccgtatgcgccatcactgctttcatctggtcgaaggccttttgctgcgtgtccgtccactggtacttgtcctgcggggacatcagagccgtcagcagcgcgagaatgtgcgctctgcaaggccacatgtcgcggtagtagtttaccatgccgataaagcgacggagttgacgtcgcgtgcgcggcgtagcgatagactgccttgtcctggagtggctgaatgccgctggtactaatgaggtaccccaggtaggacacgctgtccgtgcacagtctcgacttgcggggatgaatcgtgaggtcgcgttcacgaagccgctcaaagatcacacgtaggtgccggaggtgctcctcgaaaaacgccgacatcacaatgaaatcatccaggtagacccacacaaactccaaattgcccaaagcctcattcatcaccgcttgaaatgcgtccggagctgtggaaacccccatcggcagtcggttgaagacaaacttgccccagggagacacaatcgctgttgccgcacgactttgcttcgccaggacacgcgcgtagtaacccattggtagagataaacttgcagcgctggaactcacgaagcatctctgggatgacaggcagcggcgctgcagcagtgcgtttagacgtctgaagtcacacagcagtcgaattgatccatcttccttcagtatagtgaaagcaggagacgcccaaggcgacgagttgaccggcgacatcactccaagcttcacgagcttctgaacctcctgcttggttgcaacaaggtggatatgcgggacaggaaacggccgacaagcgagtggcttcgcgtcgtggggcagcggtaactcatacgactcgcctttgatctcgccgagcctgccagatgctacatggtgaaactctttcaagaatgctagtagcagaagcacctcgtcgtgcgtcagggtgcgcgcgtcaatcatgtagccgtagtccacgggaccgcaatcctccgccacagatatctccactcggcacgaggtgtcctcttggtagggcttgaggcccgtctttgatcctcgcgctcgtggttttggcatcgatacacgcacacggtcccactcgagctccttgctcgagaacaagaggtcgattccttgctctgagaagaagtccttcccaacatcacagggtacagtaactgcggagccactcggaactcgtgcgtgcacacacgcgtcgtcgcgaaggcaagtaagttgagaggggtcgtcgccacgtgcgtagttttgcctgtcgacttgtctgcttgtttgaatattgcttcttcctccctcagcactaacgggtcaggtacttggtccactacaatctgctcgatggcagaacgagagcagccggtgtcaatcagagcggggaaggttttgtcgccaatgcgtacttcagtgactattactggcgcatccctcgccggcttggctgcagttcgggttttggtaagcaagggggccagtgtctctccctcgtcgcaggtggcgctcgtagtgctgccgaatctctcattgcgacagccactctcgtcgcagtggacactctgtcggcagcagggccggatatggcaggtagcgctctgaccgcgtttgatgttctcctcaaatgtcattgcgttaaactcgtccgcttgatagcaccggagggcgttcagctcgtcctcgtgccgcttctgcattgtctccatcgttgctgacatttggttgattttctcttgcattgcagcaaactggtcacgaccctgccgtcccggatgttgctgctgcacattccgtgggcgatacgctggtgaggacgggtcgcgaaagcactgctcctttgtgtggttgttcctcttacaataggtgcagtacttcccctggttttgttgctgctggtggtgttgaccacgcttgtgccctcgtccagggcgcgcggtgcctccgtgttgctgttgttgctggtgtccaccaccattctcacgagaccgagatgcgttgctgttcttgttgtcgcgtgcaggtcggcgtctattgcggagggcttcatcttcttgttctactcgctcgatgagttcaaactgccgctcaagtccggcgatgtgacggggcacacagcacttcttaacagaggaagcaggagtatacaaactccaagtgaacagccgttcacgtgtccctggtctgaaggggacgacttgacttgaaaagcggtagatctaagactgaatgtatttataggctggtacagatttggcctgcatacaaatcctaagttccctatagtttgtgtcatacaaaatgtatctgttggctctgaggccacttgggtcactatccaggggagtgactgatgtagccatcccggaatagtgacagggtcactattccatgtaacaggagcgcgatagtcgcgacacctcaatctgccactcgattggcattccgcttttgtacatgcggacgcagtcggtctcagggatgggttcactctcgtcgatgaaggtaatgtatcgattcagcttcctgaaggctcggctgtattctctaacggacattgattgcgtcttccgcaggtccatcagctcgtcgatgatcattgtccgagttccgggtggacagtgaaccatcgtcagtcttcgcaaggcgtagatggctacatcgacgtggtggagttgctcctcggcgaccacgtcgttgaacagcaggaggtcgtcgtcaaagaggagaacctgcacgtcctcaacgaacgccactggccctcctccgtgctctgataccccatgaagacgtaatattccgacagtcttaacagccactccagccagtccttccaggtaccatcgcgaaagactggcacgcgcttcttgatcgtcgctccgtgctggtactgtctcctccatcttggtgtggctcacgggcggaccgccatcaagttgaaggtcttgagcaccgtcattgcgtttgatacgagtggggatccggtcaaaaggatgaagagcatcacgcccagcgaccagatatccgccgccttcgcgtcgtactcctcacacgcagccacctccggagccatgtagtacgccttccccactcgaccgcagcagccgtaaggtcgccgagttgacagaccgaagtcgccgacttggcacactccgtccttgataaacacgttctccagcgacacatcgcggtgtgcgatgtcgagtgcgtgcaggaacgccacgcccgacgccacctgcgccaacacggacatggcgttcgcgcaggacagtcggcgcgtgcctttgccttcgcccagactcacgagcgagtacaggccgcccgcgcagtgatcctgaacgcagtagagatcggagccggtgatgaagtcttcccggtagcgcacgacgtggcggtggccgccggcctggcgcagcgcgttggccacggacttctcgtgtctcgggggggggggggggcttgctgcgaactgggccgcggcgtgtttcatttcatttcatttcatttcaaggttgaggttagattgagttcatttatcctaactaagataacgaccgacgcaaaacgcggcgtgttgatggtgtccatggctctgtgcagcgagacatgcttaagtacgacgagggcgtcgtccgggtctgcgccgtcgacgatggcggcaaggtcgtggcagacgtgcacggcgccgtagagggtgacggccagcgtgctcacgactcggtagcggtgctggatgactgccattgcgcgggttggctgtgacttgtggctgggtgggacgattcccgaatgagagatctgcaccgaggcgctcggcgcagccatccgggcagtcctcttcatggagtcgcttcacgagctagccgtgcccatcttcagtatctggccacggaggggcgttcgcattataaacacgttggaaaccatgaaacggctgaaacggcgttgacaaactcgcagctttgtgtgcagctggcaacccaagaactccgcggtgggcaattggaaatgtgttgtcccgagtaacgctgcaattctggggccagttgtatcgcaacacaagcaagcgagccccaccaggtacgcattcctgacgtgcttcatctgatgaaacggcctgcagctacaagtgtacttgcgaagcaatgagttcaaggcagtggtgggatcctacagtccactagacaaggacttcgggcccctgaaggatttttaattctttgaaagcttagttcctaccgagttcatgagcttccacgtatcaacttgaagtggggctgcttggatcgatccgggctgctccacgaacagtatcgtacagatgattctgacgcgtaagggatctttgcaactgtaccgatgcctcacagccgctggactgcgcccttctgcgcgcgagctgacgcaggccaagggcaatgtacatgtacatgtgtagacgaatgcgcgcgcgggactcgaagcggatatgaagcgtgagatcctaatcgtggccacggcgtcaggcgtgagcgacgacggcggaccgagtgctcttagcacgacgaggctgccggtagggcgcccgccgtccgcagccagcgtctggcgcccaccggctgcatgcagttaccgtcgagtctccgttgcaccggtcaagtcgttgccaacggatcttaccacatttcgaaacactgttcgactctgctgaaagtgtatcgataaatcattcctgcggtttcgctggtcgcctgtctttcgtagagcaaaagatatcgctagtcgctatcacggtcaagacgtgcggtggctcggcgggggtctttaagcacctccgagcgcgcagtttctcgtcccaagcatctccgatcgaccgagcaggcagcgctccgatcctgcgccaccaaggggccgaaactgttgttagcctcgctgccccaaaggttcgcaacgaacgagctcaagatcttccacggaggaaaacggcatccaacaaagggcgcacgcgtagcagccgtttcgacgcggtgtcgtgaggcctgacttcagtcgctgctctagagcattgagctacacacatctgccagttgcagtctgcaacggtctcccgctctagctgtcgggtgagttggtggccgacctacgtgccgctctcgtagccgatgaatcgcctgtcccctagcggatcttgcctcctgttcgactgggaggaggttgaatcactggacgagtgcaatcctgtttcttcgagaccagtggctgactgcagggctgcttcaacctcgcggtccaatcaaaattgagaagacaccgcaatggtgagtctacatgtatatatcctcccgcggcgtttcctgactgagagcgtcatggcccagaacccgctcgatcgacaagcgccggcctgatcgaacgggtacaatgggtggcagcaatctcttaacagcacccccactcggaagtgtccaagctgcacgctttaattttgaatcaaagaccaacgatacccgaccgcttccctcgacgagttcgaatgcctttgccgcgttcatggcgatgggggatcctgaacaaacgaagagcatcacacccaacaacaacaacaacatatttgccgccttcgcgtcgtacttctcgcgcgcaggcgcctccggtgccatctccatgtagtacgcctcccccactcgaccacagcagctatgggtcctggcacacgccgacttgaaaaacactttctccagttacacatcgatcgcgctatgtgttgcttggattggcacagggaaagccgtgagagcgcaccgaacgtcggagaagttcgcgcgatgactggtttcttacagcggttaagtgaagactgcaactgcgtcgttgccagagcttctgataaggtacggcgccactttaggagagatttcggagtgccatttttgctttgtgatagcagtctcaatttttggcatatgaccgtgcttttggtacgaggagaaagagggcgatttcgacagtttgtaggacgagaaccaatcaaacgcgacgcacggaacccaagaaacaagtaagccttgaagccatctcgaatcgcaggtggcgccagtttacgagagattttgactgggggtttgtactgaaatgccatgtgtttgcttcgtgttgctgctcaccggatgctatcgatcaatcatagcgatttgtgcctcgattcctgcattatcattggctgtaaagggttttcttaaactgagcactctctactaaagtggcgccgtaccttatttccaaacgtgataagggttcagtatcgacagtacagtacaggtatcgtgctgaaagaaacgagaattcctcgccaggaagcggcactagatcaatcgggtcgttagggcaaacctcgcgctgcagtctcaccgcaggcagctttgtagttcgtagatacagtagcactaaacttcgcataccacatcatccacgcaaagtatttcctgtgatagatgaatgtattcatctgtgatcgttgcgcgtagttgtgtgagcattggtagcctcagctgacaaagctaaaacaaaatcattgatatttcgtccgcccggtgacacagtttccttcgtttcaaaagtcccatacatctaagttactgtagccctcgcacgggtagcttccaaatgcaacgttttctctgaccgagtcagaaagtagcgccttcgaggcgctaggctaccgtggtggagtcgtagaatactaggcttgtttactagctcggcactactctcttctatcgatcaatcgatcgtaattcagaaagagcctgccttgaagcaaggtgacgttggtagcctcaagcgagggttcgctcgaggctgaaggtgcccgcattgtgtctaaatggttcaacttacaccataaatctttcgcacagcaattcctaacttgaacgcccatcacttcccaaaattcgccccggcacaattcgcgaccttttgcgaaagtgaatcaaactcagtaggctgcgacaaaccggtactgattcaatccaaaatcagtgagctgagccgacataccatcaccctatctgagtttaacaccatttcttacttggttaagttagaacggagtcccgccctatccactccaaatcgggtggtaccccaccaactctacaaacgcgtcgatgtgacgttgcgagcttgacgaagaagccgatccgtatcgccggcggcgactacgcgctgccagcgcttctccatttcgacttcctccgcgttctgtcaatgggccgtcgttgtcgcagtcttcgcgcgtggctgccgctcgccgtcgcagcagcggcggcgctggcgctcacggcgaacgccagcagctccttcggctcgctgctcgagtccacgcggctgctggccgacgcggacgaggacgacgaccggaccattcccttcaactcatggagcaacgtgaacgacacgctgagccacctgctcgcgttcgtgctcgtgctgctgggcgcgcacccgctgggtctgttcttccccaagtacttccgcctgccactcatcaccgggtacctcgtggccggcatcctgtcgggccccttcctggccaacctgctgaacgaagacgtcgtgaacatgctcggctcgtacgtgaacgccttcgcgctgagcttcatctcgttccaggcgggccaggagatctacctgccggagctgcggccgcagatcaagtctatcctggcgctgcttacgacctactactgcacggccatggtgctgggcaccacagtcttcatgctggccgcgggcgccttcttctactcggacttcgcgcacagctgccagctgggcatcgcgctcatgttcgcgtctatctcggtgctcgtgtcgccctccacggtcatggcgctcaagatcgagctcaacagcgtcgggcccttcacacacctggcgctcggcacgtgcatgacggccgagttcgtcgtgctcgtgtccttctccgtctcgcgcgttgtcgcctccatctactgcgccaagctggacgtgtcgcccgagagcatcgccttcaccatgggcgtcgtgctcatgaatctcgtgctcggcgcgctgctcggactcgtgacgatcctcatcttccagctgccgagcgggcagccagacgtgggccaagcggcgtcgggagctccggcccacgccatgtcggtatcctcctccaggatgtccttgtcccaacgccgcatgaagaacagccaacgcattgacagcaggcaggacgtcagcgacctcgagcaggcgatggacgacccggaccaggcgccgcacccgtacaacgcgtacgtcgaggagacggacacggataagttgctggacaaaccccaatggtggacggagcgcaaggcgctctacctcaagggcttcgtctggctgctcatgggctacctgttctacctcttcaccaacacgctgagcgacctcaccaccgcgcacttcggccttgtatggcaggtcaagttcgaggcgttgctggtgctgatgctcgcgtcctgcgctgctggtcactacgctgctattcgcccgcagatgcacgttattctcgatacggtggcgccgtacatgttcctgcccttcttcgttatgacgggcgcgtcgctgcagctggacaaggtggtgagtgtgctgccgatgatgagcctgtacctggtgctgcgctacacggccatctttctggccgtgtacggcggcggtcgcttcctgctgaagctgccaccgcagcattacaagcacttgtggctgaccatggctcctcaagctggtgtgtcgcttggtctggctgccgaggtgaaggagctgatcaccgacgactggggagccgaattctcggcgacgatcgtggctgcagtggtgatcaaccaggttatcggccccgtgctttgctcgctggggcttcgtggtgctggagagagcatgatcgatcgtcaggccgcagcagcagcccaagcacacacgcagactccgcctgaactggaaaaagatggagctgactcggacgtcgaagtcggcaaggacaaccgcaagtcctaccgaactctcagccgtcacaacagcactttgagccgccacaacagcacccaagcgttgttctctacacgcggcggtggaatggatcccaggccgctgctgccgttctatcgtgtgcagagcgccgtggtgcttggagacgacgaagtggcgttcgagatcgccctggagctgtcactctacggcgctcgcgtcaatgtcccgctgctcgacgaggctcgcgcagacaagtggcgccgcatgaacgagaccatcttgcagcgcacggctaagggcgagctcatctcgttccaaaacacgatccaggatcgtcgcggggagacccctgtagactcgggtatgcagaacgcagacgtgctcatcttcacaggcgtcccggagcgctcactggagcacgcgagggtcatgcagaccatgctgggcgagcacgcgcgccctcgcctgatcgctgtggtggacgactgtgctgctggagccaaattgcgtgagctcggagttctcaccgtacagccttcgatcgcgctgggcaacatcgtgacgcgacttgcgctattggacgctccactggccgccaacctgtccaaggagctgagctcaaccagcaacttctcgacagccgcgtacttccgagccgacggtgatggcgaccgtgactcgctgacctctctctcggagctgcgcctgcctgctcgacgcctcgcgctgggccgcagcgtcgtcaaccaccactcggtggactacgaccgtctggccgaggcgctggcggccgagaacctgccgatgcccccgccgccgtcgcgtgtgtccatgttcggtacgtcggccgtcgagcacgacccgttcgccaagcgctcgcgcaacctcggcgcccacgagcactacgtgttggaagacgacggcttcgacgtccccgacgaccggtcgatcttcgaggagcagtttgtggtgccgtctccaagctccagcgctggaggaggatcccgatctcgatcccggtcgcgtcgacgctcgcgcctcggctcgagcagcagcagcgtcggcggaggcactggctacgtcacgctacaccgcgcccagtccacgggtccgtaagacctggcacttcaacttggaagatggctacactcgttgcagcaccgcaagaatagtttgtcgtaaaatagggattttgagttcaaccacgtgctttcttgtgctggcggtgcagcgcgcatgttacagttgcatctggttgacgttgaagccgctgacagccgagtctatctcggagcagcgatacatgtagcattgtcgctgctgaggacaagttgtggtgcacttcgggcgtgtagacgaagcgtgaggccatttcgacagtagaacgtggtacggcggttgtgcgtggtggccattaaatggctggaactgcgggctcttggcgccaacgttaggaatgggtcaaccaccgttggcggtgctgcttgggtctattcgcgcccgtgcaatgtctgccgagtcggaggataagtccggcgggaaccatgtcgcaaggatcccctggcatactggagtccagttactggaccactcgggctaagtacgacgcgtccgccatctgacacagtccacagtcgctgctgatccctcgccatcaaggacaagtcgatactcctcctccgctggagcgagctctgcgtgcagaaggcgttgccatttatagtggcacagcctcgcatcttgctattgtgcaccgttgccgacctatttgcagctgccgcccaccattccagaattggccactcccgttccggacgcgtccgacatggcgactggcaagcgcccagcagctccgagcgaggccccgcaggtgcagcacaagcagcaagaacaccagcaacttgacggcctcgtaagctttgaagagaccgcagcagagccgcaggacccactactgcacaggatgcagcaccaccatcgtcaccagcagcaattgcccaatggcgaccaagcggcagatgaagacgcggacgcgagcgccgccgtcccgggcgagaagctgctgatccccaaggttcgcaccttttccctgctggacgcggcctccacctcgcagctggtcaagtatctcgaagaggaggaggcgctgcaccccccgcttgagtccacgggcagcgcaagctcattgcacgcgtcgctgctgagctccagcggctcggcagtgccccgaccgccgcacagcaagaacctcgtgttggacccagagtccaatggtgccgtgctgcaggcgtccgtctcgtccggcgccgaggtcgtggaggtcgtggccgagcagagttggctcatcaccaagctcgcggtgcagttgatctgggcgctgcgcatgtccaagcgctggatcctgtgcgcgctgcggctgatctcgttcgtggtgctactgctgctaccgatcgtcaaggtcgcgatctactggttcgtcgacgaaaacgtgcacaagaatatcatctacggactcaaccgacgcaacctgctggacgtgtacacagtgccgcagacgtcaaaggactcggctgcggcctcaacgacgagcaagtcgcgcagctccagtgtgaccagcgcctcaagcgccagcttcaccgaagcgaggtacccggtggtggtgtttgtgtctggcggagcgtggatcatcggctacaaggcgtggggcgcgctcatgggccgggtgttggcgtcgctgggcgtggtcgttgtcatgcccgactaccgcaactttccgcagggcgtggtgcccgacatggtggaggacgtgacgcgcgcgatgcagtgggtctttgacaacattcacctcttcggaggtgaccgtgagaatgtgcatctcatcggccaatctgcaggggcgcatctagccatgtgcatgctgctggagcaggtcgagaagaagcgcaacgcgtcagcgagttctgcagcttcgcccagcagcaacggcagcgtcggcggaatgggcaacacgtcggactgcgagagcgtcgagagcttgccgctggcgcagccgatcacgtggaacctgcggcagatccgcagctacatcggcatctccgggccgtacaacatggaggccaacatcgcaactttccaccgccacggcttcgaccgcgcggtggtggagcgcatcatggcgcaccggttggcgtactactcgccgtccttgcgactactagcgctgagtgagctgccgtcgcgaacacggcaagcgctgctggaagacttcccgccgtgcttcctgttccacggcacggcggacaagacggtgagctatcggtcctcggagcagtgcacggccgcactgcaggcttgcggcatttccgtctccacgcgcttcttcgagggcaagacgcacacagacccgatcatcgaggacccaatcgtcggcgacgacttcttgctggacgacgtgatggcggcgctcaaggcacaggcgccgatcgacccgatctcgggcaagcctcgctacgagctgggcgcgcgaccgcaggagaagcgcttctacccgaagatgctcgtccgagcggcgcgcaagatcaatccgttctagacgtggagggaggcatgcagtatagcacagagctagggagacgtgggggtgggtcggatccggtcgctgccgctgttggcacttggaaatgaaagcaactatatattcctttattgttaaagatggagggaggctcgcctcgttaagtaagtagctgcccacccgggggcggaagcggttcgaggtctcacttgcccatgcggttcttgaaggttacgacggcgccgatgagcacgatagccagcacgccggcgatggcggggcccacgaacgacatagtggtcgggccttcgtggtgcgttgtttcagactctgcggccgaagcctcagtgctgacggtggcgtcggcttccaaggacccggagctgctggagctggcagagtcgctgctggaggagtggttcgaggcggcgagctgggtggtggtctcggcatcggcgtcgtcgttctgctgcacctggcgacgcagcaggcgcgacttggggggcagcgcggcttcggccgttacgctggcgctgcaggcgacggccacgagcagcaggagcagcgtcacgaggcggatctgagggccggccatgtcagcttcgggtgagattcggaagtggcggagaggaataagagcgaaccaccgagaatcaaatgggccggccagacgcgcgctctgatgcagatggccgcggcaaagagaggcggaatgccgcgattaaattcagatggggcgagatgggcttttgtatggccgcgtgtatggctcggaccagtcctccaaatcatcgcccctgtcgtggcctgcgatcaacatcacgaccgcatcgccatttgtccttggcggcttacattgggaagatctcttcgtatttgctgcgtgtcgtcaaggactgtccacgttggacattggagcgatgctcgccgaagtcggcggctctggcatgaccttttcgctcgctggtcgtttagacatttgaaacagcctcaaagacgcagcatcttatcctagccactgcttcaggatccttcaaagccatggcatgattcgtgcaggttggcaccacctgtcgcaatcactttttaacagcgattgtagccacgatgctggcaattcacgatgaattggtccatccacatcagtatctaggccagagcactcaggcttagtgcagcgcgttgctaccggcgacgcacagagaaggccttgcggcagtgcagccagcgtggtgaacgcgacagctttctcatttgctatttgtgtggagcacagtctattgtactcgggcttccgggaaaacaaccgggctccgatcaacctattcggcatgtcgagcgcagtgacaagcatctccccgtacactggaaatcgccgcatggcagtcgcgccagaattggcacaataggtgactttcatcagccacttaccctcgaaccaacaaggagcatgtgcgtgcccgtcaagcgttggtgaagaacggagcgtgaagggactcgagtcgtcgactggagttttgattcaagtccacccttcggcatatccgtagtcgtacggagtggctgtacatgtaaaatgtttgctacagagagcagcattgcgctaatccgccggcgtattgatttgacttgctgatacctgtgaacgtcgtggtgttggtttgagaaatcgactactgatcgcggtacttttaaagtactgcgtatccttgacacctcctcggagcccctttgggcctgcagcggaggatatctgtcgcaatcaagccttcatagcggcgattacatcacttttccgtttgggacctcgatgcacactgaaggtttccgcagaacaagctcacttcttcatttgcattgcttcaaaacccgactccacttcgccaattccttgcataataatatcatggcacctgctggcgttgatcccgatacggagtctgcaagcattatcgccaagacgttcaataacaccaagctcttcgttactggcccagctcacgccaaggctggactggtcgctattcccgacatcttcggccctcacagcggccgcgtcaagcaggatacaatggcgctcggcaatctcggctactcggtcgtgctggtggacgctgcagacggagactactttgagactctcgacggcgcagacgtgccggcttggctgctgaagaacagctttgagaatcgcgggtgcccacgtcgcgcgtatctgcagaaggagatgggcgtagactcgatcagcagctacggctactgctggggcgcgtacatccgagcgaagcagtcttctctgccggagccagtgatcaagggtcacgtctccttccacccgagctggatggccgaggagcttatcaatggcgacgtgcagaagatggcggaggccatctcggtggcccagctgctctgctccgctggaaacgatcccccggtagtgcgtgaaggtggtgcaatggaggagattctgaaggcaaagcccggtgtgggcgagcactgccgagtcgtgaacttccctggaatggtgcacggctgggtgtgtcgcggcgatcttgaggatcccgcgacgaaggaagcagttgaaaaggcttggcgcgtggcctccgagtttatcaagacggttaaccctctgtaggcttgcgtagcgtcgccattgttgcagtagatagcgtgatagactacttagatacccaccgtattatactgagatagctagtgtaccgtaaggcacaggattaattcacaggtcgaagacctgtgcttggccccggcaaaaaacttgtaactttccaaaaccgggtaccaaaccgggtctctcgttcttaattgtaatgtttaagctaatatttgccggaatcgggtacccatcgataaatgctaagatttatgcacattatttaccaaaggttgatactaatagtttattattgaccacaacctacttacggacgctctagtacagtatgagagcgtcatggcttcgctgaaggcgtatcaatttgcgccataatcgaccaagcctagctgaagatgaacaacatgacttgtctagctgcaggctacattcttttacatgtcaatttgctcaatacccaatcactcttagccgaagatgcccaacctcgtgtctgtcgccaaaccaatcagctcaactcgacagtgacacgagcatcgttcgtttgaacaatactttttttccctgcgttgaagcacccacttccaagaaattggcccattagcgtatttctcattccgcaatttatcccccaagccctcaagttaaaagtttgtttgtttgttttgtttttgaattgaggatcattatggtcacttagctaacatcctcaagttaaaaggtcaagatcagcgcaccatgcgtctctacttcgtcccgctacaccattcaccctaattagtcgtgccatgactatttaacgtgtacgacctgaagagtggctcaccctgttttgaaattccgttctcgggaaaactattcctatctacgatagactaaatattcgtcttgccgagatctactcgaatccggtctcttttctggattaaaggtgaaaatgaaaatacttttcagaaccggtggaatgattatcaaaggtacacgactaattaggtcgcacgactaattagggtgaacggggtgctgtagctctctcgtctgatcgttagcacacaacatagttcgaaaatgagcacggtataccttacctgcaaaatgaatgaaatagctctctcgttgctggcgccaacgcagccattggaccagggtactatgtcaccgatggcctcatcagatcaggcaacctcaattggtgactttcggttcctgagaacccaccacgataaagaagagcggggcttgctggttaccagcctcacaaaggtttgtctgaaacatcatttccgtatcgatacacttcgatgtgcgcaactatttgttcaattacgcagtctcgggcagatgctacggctgcgaagcagacgcagtagatgcccacgttagagtcaactaaagagttgggctggtagtgcttttaaggattaaaaacaaaacaactttgggatttactcaattattatccgttatcatcgtccatgaaactattcgtcgacctcccggagcaacgctccgggttgcctatttggtgtcgcatgaagccgtgcgtgtaacgcatgcgtttaagtatccatcatatattgaaatattatgaaagtaaacttaataggtaatctgaataattacctagtcggtctctatcaatgaagaagcatcaatcgcatcatcaagtttcattcgaatcatttcccctgaagacgcagcaacatcagggtgcacgaaggtaagaatagtcgtctgcttgggagggcgttgctgcagcttataacttgcttgtatttggttattaaaacagcgcggaggcaagaaagcaaattgatattatcgtaagtgtgttattgtactgaaaggtctgattatctggtagatgtggatgctcacctcgaacgcctcgtcatctcatgcaccccactgctccaccgtctcccggacttcactaacgtcaagaacctcaagtctctcgtcgcgctcgatcgcggtgagtggtgctacaacgggttcctgggcgagtgcgacctccagaacccgctctgccagcctcatccagtgtggccccccccccccccgctgcaacgtgtctacctgccgaccgaaccagcgccatcgcgtctcccgccaccctcgcggcagtccacaagttcagctcgacggtgtgcggtcctcaccgcgactcttgattgcggtcatggtggtcccggaggacgcacgccggtcgacgatgcactccagcaggacggaagagcgcgagctgaagagcacgcgcaccaggtccagctgcctggtatattctcgttcactggggcccacaaaccgatcttgaactatgcttttccttacaccacttcaggcaggtgtacaggaggagcggcattcatcgcagccgcagcgaaagactggttgtagatggacacctcgcactggtgcaggtacgagtggcggatggcaatgagccacatgaccacaagcatgatcgtctggaagatgttcgccgacacgatgtcgtccttcgtcggcccctgcccaccgtaacggtactgcacccgctccgtccgactcggagatctgcacggtcgtgtaaatctgctctgctgctgttaggatggcaagccacacgacgccgcggcagtagaagcaaatggggcggatgtccgtgtcgtgtgctgcctggaaccccacacagcccacagagcacacgacttaggcgcgccgcacttgcggcgcacctgtcgcccgcgctgtgcgtttatctgtttgttctctcagctcttgagctgagagcacagggtgttcgcagagtcggttcgccaaatttgtgaatgttttttatgaaagaaacactgggtttcactatggtcgcgatcggagcgcttcatttagcttcactatgcttttcgcaatttctaacgtaaaaaacacctgtgtgcaagcacaccacatcgcgctcacttgcccctgctattgttggcgactcgcatgggacagcggaaaaaaatctgcgacagaatttagacacgtagactcgtgtcaacatttcccaggttaggtactcgatacttttgcctacttgaacaggcaacaacggtactctcccgctcaagttcatgcgctccgcactcaacatagcgtcgcaccaccgaaattaaacttgagcggtaacgtgcggtcgcggaaacttccttacttaagttgcgttgccgacccgtcagcggccaatcaaagtggcgcgcaaatatggattccgggctcacttgagctaactatggtttagaaaggtgaacccatccaaaaggaaataaaagccatgcgactgcgcggaaagccagcaggtttccctacttttgttacggcgacccctcagagctgtcaccgggtgacagtttcagggagtacaaaatatcggcagcttggtttttatatgcgcgagtggtgttttttactcggccaatcaaaacgtgggcagatgcttcgcgcgtgcccggtatcaggagcgaaagaagcagcttgttagtaagacacgatagaatagtagtgatggggacgtaaacgacgttaacttttacctatcatatagtatatgctgtatgataggtttttggcgaattttgctgttttgcaatagctagtgtaaacgtatgctagtcataactatgcatctggcgttaaaattacgaaactcgtactagaactacatcaaaactacagctcaacttttgaacctatgatatagagtacgccgaatgatgggttttaagttaacgtcgtttacgtccccatcactaaaagaacaatattctaagaatagatgtgtcaagccagttttcccaaactcgttcgactttacttttggcatgcctttctaaccaacactagactattaggcataatgtaaagtctcccgtattagtgtgacttgtatattagcgtggctttattactggtgtgggtgcgtaattaccgtagcccgcactaatagtgtagactgagccagatttcgggtggcgcaaatacactattgacactttttactgtaacagcttagttttagttaagggggtggcgttccccagctagcttgcatgcaagccaactagctggccgagtttaaggcccaccacaccactcccggggttgcctcgcacggattcactgcgaacccgctgcgaggcatgccttcggtgatctaaggacgttgccttttgccccaaacgtgttcacggagaaggttgaaaaatagtgcgttcacaagaccttgttcgcttttagcgagctgagagatatcgtgcgcgaaaagcctcgtagagactcgagcagcgctactgttctctaagcggatagcttagagccagcgtcatttcttgtctgaccatcagttttatacattcggtactttttaatatgaacttgagtattcaaaatcggctggtactaccggtataaagcagcagaggcggtcggatcgatgtatttaacgagtattcagttttggaataaaacgccgcacgtgtgggccttagcggaccgacttcggaggcggcgcgatgaacgatcggctgcgctgcgcattgcagcccattgatcaacattgtgttcatcacgccatgttcggtattcgctgggcatgcttgacggcacgctacatacgcttgaccatcccgagcgccacggtggggctcgtggagatcgcgtcgctgtagtacgtgacgcacaccacagagctacgtggtcaagacaatgataacagtatcatgacatgcaaatgcaactccaattattcttgctagctcgtcgtgcaatagcatctcatcgtaccataaccatggtggatgggataggacgccgcgtctgtcgtcaggcgattaaacattccaaaagcaacacgtctttgttaacaaccgacttgagagtagccaggtcaatatcacctggggcagtcagtgttgtactgctcgctaagcactgtacgtgatgccgcccttcacgacggggtaagcccacctgtagatcggcgtggaaatactcgtatccagcgaccataagcgccatggtgataaacagctacgcagaagtgaagggctgacgctgtattggacaggtgctgtgtgggccgggccagattgaatttcaaccacagtacagtgtagagtagtgcgtaagtaagaatacagcatagaccttcaaggccatgttggttgcagtgaagcgaacctacaccacccgctgctggtttatacgagggctggaccattaagttctgtcgtaacgcagatggtccaaccctcacataaagctgcagatcaagccttgtagcaagatgcaagtttggtttgctgcaaaccgtcgagccgacgcgaaaggactatggcagggacagcgcttgggcattatcaaggcaagtcccagaattattcaaggcaagtcccagagacgctttacttcaatatctctgtgcctagtgtgtgcattcagcagaaacgaattgtcagccaagcacaagcattggagctcaagtgaagttgcgcctcatggccgaagaggacccgttcgctgagatggacgcgatgctcgcagagcaagtgcgcctacgggtactcccgccgaagcgaacggtccgcggggtgcgcgagttctacctgacgcacaagtcgaaggaggacgactacgttgctgtggctctgtgtttcgctgggatcgaggaccagcccaagctgtatcggtacgacctggtcgacgcgattttcgagggcaaagaggctgggctgaaggcgagaatggccaagatggaccgcgcgatgcgcaacactatcacgttgcaggtgacaatgtggaagcctcgtaagcgtcccctgggctgagtgcgctgcccgcaccaggttggcgaagtcgccgtcattggcaaggtccgcaagctgcagatgtaccattcccttctgcaggggcaagtggaggcgtaggattggatggctgagcaggagcgcggcctctaagcggtccgacaagttggaggcggcggcgattgcggcagagtgacgtactttcatgaaaatgctgaacaagatgccgagcgaactacccacaaccagtgttcagcagtttgcgttggatgataagcatgagcttggtgcatgcagggcccaccaaaagaaaggtatttagcagatcatcgtggtaggtaagcctaatttaatataacgagttgtcagtgtcaagcatgtattgtccgttttggaagtttactgggaagtagttgggcacgtcgctcttgtgccgtccaccaccgtgatgatatagtactagtatggctgcggcaggttcctcagcgacatacttcgaccgtgtagcgagttgctcagcagcccctccaagatttggcttcgccgtggatcttgcagcagttgcgttcgttgaagagctgcatccacaataaagtaataagggcatgtactgcatgggatcgggattgacgtcggcagccaggaccagttaccagtcggaggggaagctcagcagctactcgcccacaaatatgagcttgagcaactcggagctatagtcgacgataatctttgacaacagtggcttgggttttgggtacgagggcagtgtgggggtgggcgtgtggtcatcttgacagcgggaccgaagcctggggtcatctcgccagcacgcccacgaccatctcgtgcgtcgaggcactaacctcgactaatagtgcaattgtactaacagtgacgcactattagtacaactgcagccactggccaaaatttcattttctcctccaatcaaatttttcagtttcatattttccagtaaccaaatcttcagatattttcttctgtagtagcaaagagcagttttctcggagacatccaatggaggaagagactaagtgtgaagatggcgctgggtgcgggctgagtgcccaggtgcgagcgattcgtagtaaccctatgtatgcagtactacttgcggaacaaagacgaataagaacagaacgagaacaagcttcggatagcaataagcgcagacacaatgacgaagataaccagccgagtcggaaacgtcgtaaagttgagagacagcgggaagcagagtatcaacgccttcatcggcttcgaaaccaagcattaagagatgagactgcgttttatacctccgcggagctcgatgcaatggatagcactttaaacattaaggtaccaaccgtggtagacctagctagacttcagcgttctgcagttaggatgtttgaggcttcaaccggtgaaggagcaatttgctgcgtgtgcgagcttttgcatcctatgaatgatgtacaactgacacctttgacggataccattgccgaggtaagatgttctctggttaatttaggtgtcatgcgaaacttctcttacccttgtgttcgacagagcatgtcgcggttattgcggatacccgacaacgcagatataccagagtttatcttgaagcaatacgacgcgtcagcactcgatgctcagataaaggaccttctccttttcccaccaggaaagatacaatgttgttacagcagaagcgcatggaaagaagccaaatccaccccgaaaagaggttcaacaggttattaacctacgtagaggtcttcgtaccagtgagacagcattttatggatcgaatttgagcagaatgcgagcacgaaacgatcttttcggatatattaaacgttttggaccactacagctattttttacggtatcacccgataccgctgggacttatacaattgctgaacaatctggtgtactaccgcatcacgtaatcgaagaagccaacatgcgtcttttaccaaatcgtgctgatcggaagcgcattgtcaacaaccacccgatgcagtgcgccttattttttgacagaataatgactattataattgatgtttttcttgggtgggatcgaaagacacatcaacccaagaaaggagggggaattttcggtgtggttcgagcatttggggctgccgcaggaacacaacagggtggtgatctccatgcccacttcgcggtacggttacacggatttcctaccacgtcacagcaaatgaaagaagccatatcttcgaacgcagcattcacacagcgtctaaccgattatgttgattgcatttcaacaacaactatctcagtgattgaatcaccaaatcgttgcttcaatgaggacgctggagaattgaaaccagttgcggtcggtatcgatggataccggaagccattgccaggacaacatgcaccgattacttcttgttgtcagatttgtatgtcaagtatagagacaaagatgtgattaatgctgcgattgatagtgctgcgcgtcgcaatgcagtaaagttatcacctgaaaacattgattttattagatgctccccaccgcgtaataatgataatagctcattgtcggcactagaattaagcctcatcgtccgcgatgtacaagttcactaatggagccacgcaaattcttgctttaagcctacgcgcagaacaccgaaagcatctgtctgccgtttctttaagccgcatgaacctagactagaaaacacttgaaccgacgacgggaacgatttgcagttgagccggccgattggatcagagtacgtaaatgcatacaatcgaacgctaatgcaaacgctaaaatgtaaccacgacgtgcagcttgtgtttggagccagcgctaaaaacgcagcagcatacatttgcaagtattgcatgaaaaagcaaaatcccatcgaaaacgaagttcgcttttcagttggtgtattcaacaaagctgtggaaaaagcagatcggtcaacccatcacactgcagaacggagagggtacaaattgctctcatctatgctatatgcgctgacgaacggccaagaagttgcagcaccaatggccgctttatatattcatcgcggtagtccattttggttctcacatgagcatacgtatgtgaacctcgaaaagatgctacagaatacaaattcaccgacagttgaaatcccgacccccgaagatattaactcggattcaaacgggcccgtatggaatggtaaacgcaagctaagtatgtactggaaacgacaaaaagagttagataacgtcaattttatcactatttgtgaatggcaccacagcggaaagaaacaagacgccgatggggcgctacactttgaaaaaaatgcacatcggcaacttttcatcatgtcaggaaagcaattgccagattttaacgctaacacatctgatactgacagaaagttttactatttggtgcttttgacactttttaaaccacatcgagaaggtagaattgttgaagggtatccaaacgctgaacgcgcttacattgggtttaaatccacgtgctcagctcttcaacaaactcaaatgagggaattcgaagagaagtggatagattattacaggtctgaagctatagaaaaagaagagcaagaatcacaaaaaggcattctgcttcgcacaaaatctgagctccatggcagccctacgatcgagaaacagaaatagacaatgacaacttttccgatgcggcaagtggcgacggcgataatagcgacaacgagttagaaacatgcatggatcaattaatcagcgaaacattgtacacgtgccctattgatgaagttcagaatttgcgctccacaatcaacaacacatgcgataattactcacaaccaacagaggcttttgtacccgcttacacatcattcgaagactacaccgaacacgtcgcttcatacaacagtgacaataacacatcaacaggaactagcgatttcattgcagcttttcctgaagccaagacaagattagaaagactccaggactgcttcgaagcagttccctgggggcctgatcaagccacagccacttcgataagttctatacctgccttcctagcattgaaacggtctcaaaggcctttaacttcaacttttggcagcacgcgatatttgaaattgcagcgaggcatctcctatttgcatacttgtcagatatcaaagatgctttacaagaaccattatttccagaagattttgtcttgcagccctatgctatcaaagaacagcttatagcgtacgtcggaggagaagctggtactggtaaatcacgagtaattctcgcactactactacttgccgagaagtggggtcgagaaggaagcgttgaaacccttgcctttacaggagtggcggcaatgaatataaaaggcagaacaatacactccgcacgcaacctccagctaaacggtacacaatccaactctcctcccagtttgcaaatgaaaaatgcttttcaaaaggtggtattagttataatggacgtaatatctacgacagatcaagggttactaggttccgctgacatgacatcacgagcaatgtccgaacaaccccacaaaataatgggcggaaagcatgccatgtactttggtgactggttacagttaccacctgtacgtggaacaccatgtacgttctaaccagtttcttattagtatcttcgtttgctaattggcaattcatatcattcccatggtcgcaggctttaaacctccacctctagcaacaagcaccgctaggaatgttgggtttgaagtctacaactccatcaactttgtcatctttctcaccgaaaatatgcgtgccaaaatcgacccaatctacgcagaaattttgagtgaacttcgatggggtagactatcagacgctcaccgaaaattattaaactccagagtatttacagacgcgcgacgttcagtgagtaaagctggtcgttctccggattcctattacaatcctgttcttgtcgccactaatgcactacgatgtgcaattaatgacacaatgacaatccaagcatatacaaagactaacactacgatatacgaaatctcggcaaagccgacacctcgatcaaaggcaatcttcaacaaaatagttaacgcaaacgacgatgaaactgaccgaattccaatgaaattaatctgcttcattggtatgccagtaatgattacaagaaaacaccccgctctaaaagatgcaaacgctattgctaatggaacaaccggaatcatagtaggtttcgcgcttccactacaagaatctgcataccgtaataaactagttcatggcactatcgtaaaagaggtgcttaacccccccgacctaattatcattcgcgttcacgactgcgaaagcacattggtagatggatatcctccgggaactatcggaataccagttcttaacgcacagattaagctgtcaaaattcaagaatctagctcgttcatcgatttcagttcgtcaatttgcaatagtgtcagccttctcctgcacagctgaaaaactacaagggaaaacctgcaaggatggcgttacggtaacgcccttagaaagaccaggaatgccacatcaaactctctatgttgcactatcacgaacgacatcactgcaaaatctaacacttaccgaagatatcacaccagaatacatgcagcagttccaacctcctcctacgtatgtagccgaaatgctacgattccaagctctcatagatgtgccaccatatattccttctgaagagctcttaaaattcagtatctggctggagaaaaacaacatacatacagcaacttgaaaaaatagccgaatataaaaaatggatccactcgatcccgatctggaaagcgtaccagcgttgaagtcggcgtctttgctgttgtaaggggccgctacttatctgccatggatgtctgccgcgcgcaggctccaagatttgccataatgatcaccacctgcccccaagcttcggaacatacccaccaagcctccgagtccactccgacccaaaatacatccaagaggccttagcggtcagtcacggggtcattttagccgccagcgcgttcggggacgacgtccacaacctgccaagcaaccagcggacgggtagattcagtgcgagcagaacgtggcgagtcgagatgtccacgtttatcatggacgcgatggagacccggtggtccgctgatgttcgctggcgtggcgcatttcatgttggggttattttgccctaattgccagctcaaaaggcacggcctcaagcatgctgtcagctttccgaccgaaaccacgatgactcctgagcaagctggagaaagttaccgactctgtgggaaactccagccaaactcctgcataccagcagtcagtgtattagcagcagcaatacaacaagcaagataactacactaaatctaagtacatgttgtcctttgcactagggcagggatcagagccttcgtgctccctgccatcaatctcgttctccatagtaaagtgtacatactcctgctgtcattgtacgacagagctggatacacttgatagccgcgcgtggcaaccacacgcggaagagctttggcaagatctgtcgttgttgagccgcagcacaggtaagactgtatctcacaaagtcgtgctcgataagtcgtatagttacaggccaaactcgcgaagaagtctcgttggatggcattatactgggttgcaacaactcacgcaccatggagtactgtagaccttgacagtttttcttcctgatcgtggggcgagcaaaacaaagatagtaacagaatagcgataacaatatcagtttcaaagtcagtaactaatagcggttgcagtgtcagtaactaatagcggttgcagtggcggtggcattgacagtagggcagttgcagtggtagctggcagtgatcgtgacgcaggcgaacaatttcaatagcaatataccgaataagaattattgtgcctttcacttattctgccgtgataattctggcataactctaatccgttatcgaccttaattatgccccgagttagctaattcccatgttaattccgggtcgtccctccgtggccgaattaggaacggcgatggtgaggccgactcaaggcgggataagctaatccagccttcgttaggcggaaacagagcgattggcggtttcctatccgccaatccatgccattctgctcgtatctccgtcaattagctctcaaatgctgatcgcggatgttaggggaagcgcccacaatcttaggcagaattagcactaaataagcattgatcacccttttatgactctaattccgcctgaattaacagctcacccgccaaaatacgtgaaagacacaatacgtcatattgatactacttacgcagcaatacaagtcacacacattatttggaaaagaggagagtgatttacaagggtctagaggacgataagatcatcgataatgtttggatcgcgtcgttttcaccacggtgggcggcgatactcagatggcatctacttataaatttagtttgagcaagccatgaaatgccccgtgatattatgcagcaagtcaagcagtagggagtagattttggcagtctttctcaggcatgaaaaagaaagcaggagcaatatcattacagtgccattatcaatgctgagatcgtagttgtagcgtaaataacaacggtagcggtagtggcagcagataataaacagtcgcagtagcgatagcagcagatacgaacaagcaatatcaatgacaatattagtgaaatagtagttgtagtagctgtagtacagcgttacagtggcaaaaaacgcaaaactgttcggtgcgtttgcctccgcttagagacccgcacgcgaagcgcgccccagttctctcagcctgaagggctgagagtataccgctcacttttcgtttctaaacgtgccctgcttcaacttggaggtgttttaaacatatttgtgaaatctggatcactaaatatggaaatgttttatacggtttctttcgttgtcttggtatgtgtatactctgcccgtacggaagacttccatgggacgacccttcatatttgtgaattggcagattcagaaattccacctctcaattgaatctcgctttgaagccatttacttttgaatattttttcagcaaagtacggtactaccccggcttaagttcatggtttgtcacggccattgtggattgcactatagaaaaacacttttacgggatacagcggtagaccctacctcgcacgaggaccacctcacttgttaaagtacacaggtcacttgtttaagtggccctttcggccaatgagattcagcccaaaatatggagctgtacctgttgcagctgggaagagaagtgagaggctttcactatggcccttgagcttcaattggtacagcccggccatttaaaaacgagttagaaacgtggtgtaccgtacactttacccgggcagacaataaatgtggtgtaccgtacactcgccattatgcctttcaaacggcctcaagggcggactacaggctgccaagaaataggcaagcctttcgttcactgggaagctggtctgatcggcaacccgacgcggcgcctgccggtgccgtcgttcaacatcattaacggtggctcgcgcggtggcaacaagctggcgatgccggagtttctgctcgtggccacgaggttcacggccggcttggaggcgtaccacacgatgaatctgttggtgggctaggcctagtccaggatccagagacaatattcgtgtagcagtcgagctcgtgggtggggtgaaccacgacatgcgtgagcgactcgtagagcagcaatatggagtacagaggcgacccgaccgtcacctgcacgttgtagtgatgacttgacgccagagcttctattgcacaacatcgttggcctgcgtcagagatgcaacacgtacggtggctaacatgctttttgatttaggagctgtagacgaggcctaacaagtatgtctgacggacacaagaacgattacgtggaaacatctccttgttatgtatttacgcgtatgaagaaaagatcgcatccagatccaggaggaagtttaagaagccgcagcgtgagcaaggcactggcaattgaagagttctcggttgcgagcgctgtatcggaaggtgagttcctgaagaggagttatctcggccgccgcaaatatcccgaggcgggtcgtgttcgtccagttgaactcgtacatcacgcaattcggttcacaagagtggttaataaaccgactctcattgccgcacgatagcacgtcaacgtatactttcgttcctccattccagtcagccagggtgcggaaggctgcttgataccgtcggttgacgcgttcaattgcgtcgctctcgtacagtatttcaccgacgtactcgataatgaaagccccacgggggatcctttgggttgaaacaacgccaagcccgacccgagatttcacaaggtcgagtgaaaaccgtggctcaaaccggttaccacaggctggaccgagtaagcagttgaagtcgtcgcagatggtggccgtattagcgttgacgcacgcgctggtcaagtgagtgccggtgttggaaacgcagcacggttcgcagttgcaaggttcgtcgttgtacaccggtgtcgtcataactgggtatggttgtgaagcggaaaagaggctgcggtcgatatggactacgtcgtcaggccaggcctgtgggacgataaagtcgtagtcgcctccaacgaggggcagcagggtttgctcggatcgcatgatgcaattgctacggggctaacctagtgcaagtttgggtatgcagaaggctgagagacctcgtgcgcgaagagcctcgagcagcgctactgtttatttttgctatctcagcccccgcgaagccctagtctgaaaaaaggcaactttcatgttgaagtgagtaaacacatgctcttcagtctacacgctagatggtacactgtaccggtcctctcgcccacccaaaaacaaccacttggtcattggacgcgtctccgcagcctgcgctcgctgtgtgtcactcgttctgctgcgcttccttcggaccttgcgctcgcgtctagtaacttagtggccactgtaccaactcagcttcgtcccaccgcccgacttgcctgaatcgcttcgcaatcgccgccagaatgcccgagtacctcgtgtttttcgtgcaccagcacttcgacttccgctacccggagctggaggcgctgctgaccatgcaaaagctgcccagcgtcgccgagacggtgctgaaggacccggagactggagagctgccgaaccccgagagctcgccgctggtgcgcctccagctgccgtccgtggagcacgccaagttcctctcggagcgcggcatcctcgtcaagggcgtgtacgaggtgtggggccacacggccaatggagacggctacgacgagctcgtggcggctgtggacaatttccagggaccgcagaagcagaatattctgcaggacactaagcgctcgtggcgtatcaacgcggccgtgttcggcaagaagctcagcatggacgagcagcgcaataggcgcgaacgtttccgtgatgttctgccctttgctggccccgtgcagatgaagaacccggacgagacgtttttgattctggaggagctcggactggatcaggatctgcacccgggcatgaagcccaagcagattttcttcctgcgcgaacttgctggcagcgagaagaaccgcgggcgtggtggagcgagagaccttgtggaccagcagacgctgaagcgcagagcttacattggtcctacgtcgatggaatccgagatggcactgctaatgagtaacatggcgctggtgcagcccggtgacctcgtcattgacccgtttgtggggactggcagcgtcttgattccgtgcggaacccacggtgccatgtgctacggcacggatatcgatatccgcgtgttgctgggaactggtgttggtgtcgagggtgctggtgtcgtccccacagatgagaagagtgatggcaaggagcgtgtcaatgtggtcaccaatttcaagcaatacggcctgccgcttccggagctcgtgcgtgcggacaactccatgtcgcctctcgtcaagcagtgcaacggcttcttcgacgcggtggtctgcgatccgccgtacggaattcgtgccggtgctcgcaagagcggacgcaaacgccagatcaagagcgatgtgagcgctgcagtcaagcagccaaattacattgcgcccacgcagccatacgcggccgaagacgtgatgaaggacttgctggagttctcagctcagacactgcgcgaaggaggacggttggtgtacttgctgcctaccacgtacgagtacacggacgccgacctgccccgccacccaagcttgcaggtgatcgcgaactcggagcagaagctgaccaaaaagtacgcgcgacgcctcattacaatggtcaagcgtacgccgactgctgacgagatggctgcggctgagagtgcagcgacggcagccacgagcaaccctagtgatgtgagtttcgcgaacctgcgagagaagatccggaagcgcaagtctgacgccgtcgacgaactcgtggagcactaaactgaaaaatatagaggtgtttgtcatgaagctgtcgctcgctattgatgtgaccaagacgatctggcgagaaaggcaggaagcgaagagctacgatccattgttgtaagctggcgacaggaagcaggcaggcaagatgaactcaatgtcgcttgaattcatcttgaacgagtctgaggaagcgccagaatctcgtccctccaagcaacaaaaacgaaagactgcttccgctagccgcagtgatcctgcaacggccgacaccagtgaacagagcgccaaacgacccgcccgcgacaacaaggctgccaaggagccttcgacacccgacaggtacgtcgaagtaaatcgcggctttctcaacgatagcttcattgacgatatgcctgcccccaggcagcagcatgtgcggcagctgcagaacctgcgtcagcgccgctaccgagagcgcaaaaagtcgtcggcatccgcccagcaggaaaatgctgagcgcctgaagcaggagaacgcagcgctggagacggccatcttggagcagttcaagtcgcggatgtagtcccacagcatatccaagcgtacgcagctatatagactacctcgaatcctgtaacttttcaccaagcaaaatactactacgaagtagttgtagctcctcttgaccatcgtatcatgtacacgtattttccttcatgttgcccaccagttgcaatccaagcagcagagcagaaaagtatccagcgcgattctgagagtgcgcacagcacggtgtacgtcgggtccagcaagcatagcacgcgcagcgcgactggcaagacgccagcagcgctacaggctcacctccaagcgtcctccgtcgccccggccccgcgttgtctgccaggcttgggcacttcaacatgggccgatcccaagggcaccggcgggagcagctgggaaatcttagcgtggcgccgctgccgatgtcagcgcggcgtcgcgcccagggctgcagctgccacctgctggggcctgccaagcttgcgcagcaggccggtgctgccgagccaagctctggcgctgtcacctcgggggggaagggaggagaccgcgtcggcagatggctacagtgcgagggattacgtgcagttcagacctgaacccactcgggaccagctggcgcgtcaatgacgatgccacgcgttgatccttgcgtgatttgactcgcgcttgtataggacatacaaaaaccgagtaaaatcaggccggagccggcctttattgtgagctggagcgcgctgattgaccgctttggctcggagccgacagcggcggtgcagcaactttgaactggacgttttgtatgggcagacccgatcggattgggcgggcgccgccagacttgatcccccgctgaaagagctccacgcggtccctcgatttgagggggttgaggcataaatgccccagtactcgcaccgcgaaacccgattcgctgttgtcgcgccgtcgtctcggcgaagtggctggcagtctgcaagcaaagataattgcccgagctcgcaagtaagagcaccgaccccagaccgacacgatgacgtcgccccgagaagcggccgccgcggcgcccacgcgcgcggaggcgcacgctccggcagccggcgcagacacggcgcgcgcgctcgccgccaccaacggcaccaccaccagcagcatcagtaagaccagcggagcgagccgcagcagcgccacgaaggacgcggccgccgagtccgacgccatgcgcagccgccagacgtgcgtggagttcctgcacatcatgaaggagttctccgagagctcgtgcgacgccaacgagaccgtgcagcgcgtggactcgctcgtgagccaagacgagcaactgctgcgactgttcccgctgtcgcgcacgcaggaggaggacgaggccgcgcgtcggctgcggagagcgctcgacgaggaggacgacgacaccatcgcgcggatagcggccgcgcgcgacaacgagaaggagatggacacgcaggacgagctgcagcgctggatggatctcgacctcggcgacctggaccaccaccacatggacgtcttcgacttccagaacgcgcacacgcacgcgcagccactcgcactcaacgagatcacgaccgatgcagacgccgcgcaagtggtgccgcctaccgcctcgccgttcatgaagcgcggcaccaacggattcctacaacagaagactaccgccgaacctgcgaagactacaacggaacgggggcagggcgcaccccaaaagccgctatcggccgctgcggtcgctgcgaagagctcgccactgattagcaagaagtccgttacggccgcgctctttgacgacgatgatgatgatttggacctggtgctgggcagctcggcgctgtcaagtggaccgccactcaagcgcgtcaagctctcgcggccagcaagtgcgcagtcgctgcgtgtgtccgtgctgccggacaccgaaagcaaggctgaaaccgacgacgagagcagagcggatgaggacgaggagggcaacgtgtggggcatggaaaacgacggatacgagcacgacttgctctcttcaatcgaccacgcggtgctgtgcgaccgcgagaaccggttcttgcagtgggatatcgaggccgcccagcagcaagagcagcggaggttacaggcgaacggcctggctcgacaaacttctgccggcgctgctggccgatccgctaacggtgtgactatctcgacgaaccccgccattaagggtctcactgccatccaaaccactcgctcgcttcaccaacccaacgacaaggtcatgtcatccagccccatcagcagcaagagcccgtccaacgtggatatcgtcgaggactggaacagcctcgactttggtaccttccagaatcgcactgttagccacatcctgagctcgtgcctgcacaagcgcaaactgcatcacccgtacaagaaccaagtgcagctcgtgaacttcaatgtcccgggcagcggcgattcttcttccgggcgtggcgctggaccgcacccgcaccagctcggcggatccctagcgaccagtcttgcctttggtggccagcagcagggtggtcttgacggctcggacggctcgacaattagcggattcgtccctctgctcgcgacaagccatgaaaacggattgagtaacagcaagtctccaggaaagggtgagaagaagacgccgaagaagcgcgaagagcgcaagaggctgatgacgctgaagatgcaggagacgtttgctgacttggaaggaactttcacggagcaagatctggatgtcaagggaatcgtgggcccaggcgcgtcgctgtctaaaatggcattgtctaaactggagaacctaccgctgccggacctgacgaacctcccgcaagacctgcgcgagcttaagcgcaagattgaagccactgagcacaaggtggaaggcacgaagcaccgtcaccgcaagggcggcccgtgcccacgctgccaggtgcagaaccagttgcgtgcagctaagcgagcgtaccacaagcgtgctgtggctcacaagaagctcccgcacgtggtggtgaacgctgtgaacgacgaggcccaagaggctgccaacgctcaggccgcggctgccgctactctggaactcgcaggcagcgttactgccgcgatgaaggctgctgccgccgccggcgcggtagcacggaagggaagcgtcggctcctcaactgctgcttcaggcaacggcacttccagcgcgaaggcgagggccgcacttgccggcgtgaccaatctctcggctggaatgctgaagcaggtgcagcgtcctgcagcgtcttcggtgtcgtcgccttctggatcgttgtgctcgatgtcctcggtggcaaccaccgctactgttggatccaccagcggttcgtcgtcatcggcgtcctcctgtggcagtatttcgccgtcgccgccttcgtctgctgcgtctcttcaggcgcacatccgaggcccatgtggaaaggcgtcatcgtcagccatgccattctcgtcgccatcgtcagcctccgtgtccccgggctcgacctccaacccgtcatcgcccgagacagcgtcacctcagctgcagcacgtcactgtgtcatccggttaaaatggcatgtgaggcgaacggcgaagatcaagcagtcggctggtgcagcagcgcacggagccacggcgtatttattagtgtatcagagctccccacatacgccacgcgcgacttgcgttgctcggaagccgtcaggttattgtatagcatggcactggaggaaggtaggagtagtcgttagttggcgtggacaccggacgcgcagcacaactgcgctcctgtagagtgtgaaggagtgtagcagcgcgcataaagagcacaaaaaatagagaatccacgtagcttccagcgcctccaccgacgcctcaccgcttgttgcaaattacgttgaaatctattggtaccatcatcatagtcgctcagtcctgtacttgctcggtctgctgcggcttgctgatgacgttggcgtccagcagcgccagacgcgcgcaacggcgccgcagcttctgctccgtccactgcatgttgttggtcttgatgtcgcgctccatcttcttgtagtcctcgccgtgcttggcgatgagcttgcgcaggtacttggcttcctcctcggacacgtagttggcagcgcgcttggggttgcgctcgcccaggaaatcgctgtcgggcacctcgaaaagacgcgcctcgtccgccgcctccagcgttccctcagcgccctccacgctcttgcgcagcgcgtcgtgcgcgttcgggtcggcctgcagtccgagcttggcgtagttctggcgcgtggtgaggttgtggtcccagacctcctgcaccttggggtcgcgcacgaacttggtcttgaacttgcgcagcggcttctgcttgcggcgctgcggcaccttcccgcgcttcttgatcttcacgcccaggcgcaccattattgctcaagctctgcgtctggagtcaacctggtcaaaaacactggagctccgataatggcgcaacggttaaaaatgtgtgacgtgtgtggggacgtcagcaccagccaatggtcgtgttcacttcagtgacggcccccgctagaatgacatgttcaacatctgactcggccaatcagacgaaaggacgcgttcccagaatggatcgcattggccgaaaagaatagctccaacacggcacaacacggcgagcttatagcgcgcgccattgcgcaactggagcagagaaccgccgagcatgacgcccaccgcagctccgacggtgtcgctgccgcccgttaaggtggccccctccaccaccagcagcgccacgtcggcgcccagcagccccatgagcagcgccagcagcggcgcggacctgagccaccaggtgcaggcggcgctgacccgcctgctgggcgtgagctccgcgttcaaggacctgcagccgggcaaggacacgcaggtgtccacgcgcgaggagaccatcgccatgatgcagcactacctcaagcggctgcagctggacgacgtggtggacagcagctccccacgcgcgctctcggtgattcacgtggccggcaccaagggcaagggctcgacctgcgccatggtggagcgcatcctgcgccaggcgggctacaagacgggtctcttcacgtcgccccatctggtctcgccctgcgagcgcttccgcatcaacgggaaacccatcgcggacgacgtcttcctgcgccacttcaacgccgtgtgggacggcctcgagagcacgcaggaccagagcggcccgtacccgcccatggcctggttcttccgcttcctcacgctcatggcgctgcacatcttcgccgacgaaaaggtggacgtggtcgtgctggaggtcgggctcggcggacgactcgacgccaccaacgtcttccgcaagcccgttgtgtgcggcatctcgacgttggatctggatcacacccgcgtgctgggcgagacgctggacctcattgcttacgcaaaggctggcatcttcaagccccgcgtgccggccttcacgacagcgcaggaaccgctggcgatgcagatgctggagaagtgcgccgccgacacgaacactcctctggttcgtgtacccacgctggacggatttgggcccgacggagtgaactgtaagctcggcctgcacggcgactaccagcgtacgaatgctggacttgctgtggcattggcgtatacctggctgcgtcacaagcgtggagaggacgcgacagcgccgctggacctggccgcgacacttgagcccgatgtgaaggaaggagtgaagtacgcattctggcctggacgagcgcagctctgggaggatgaagcgcacaagatgcgcttctacatcgacggtgctcacaccctacgcagcctagagtgttgtgcggactggttccgtcaggcggcgacgcgaatcactccagcggacaagcgcgtgctcatattcacgatccatcacgagcgcaatgtggcacagctcttcgagccgctgttgaagcagcactttgatcacgtgtacttttgccccacgagctcgtcacgcccgagcctggctaaggtgcacacgttctcggaagcactggaggttgctggctttcagaacgtggtgtcttcatactcaccggaagagttggcggcgctggacgacgtgagtagcgaggctcacccgtggcagacgacgctatcgcgtatctggagtggattgaagacccacgtgatcaaggaggaccagagccagtgcgtggttgcggtgaaggactcggtggttgactgcattaacgagctgcgcgcgctctcggaggcggcaggagcttcactgatcgagggagaagctgcgaagggcgagcaatgggacgagaactggagcgtgctcgtgacagggtcgttgtatctcggcggcgaggcgttggacttcctgggctggcaggagtaatcggaacggcaagtaaggagcgttttgtccagaagaaggaactccatgcaactctcagcgaaagctatgtatcgacggagaggttccatgcagttttctcatatgacggagcggagtaagagtttaaaatgcaacgtgaagagaaagaagtcatgtgattgtcacggtagtgacagcaatgggttatgtcgatgttttggtgtctcttgccttcagacaaaagtcatgcacggaaaagctgaagttttcgctagtcggatccaacttcaactttgaacctggatacctcacgttcggcatcggtcagtgcagcagaactatcaattggcggatggggtcattggacggaagttacaccacttctccgagatgtcgttgtgcttccatcccatacaaaggaaaaatatctcgggatccttcacatgaacgaacgtcttcatcacgagtgaatcgctcgtctcggcagctccttctttcaaccggctgaacacatgatcttcgcaatgttcatcaaaaaccttcacgaatacttcgacctaggcacgagaaaaagtgatcttgcttctactttcctcacaaataactgtggtaaccagaatactactgtatacccaggactctctaattgggggaattgatccccatttcccccactatacccctgttaagaagacccgttcccatcccccacaaaatacagtcaaacctgtttatatgatcctctctatttgagccataccgtttatttgatgcaggctttgtcgctaccaaatatttcacttagtttttgtatgatctctgtttatatgcatacaaggtatttgagtcacatttttgggtaccaaattaggtctcacctgtttatttgattcacactgctcacggccacacactcttcaaagcaccactgctcaacactcaacgcctaccgcaagccttcttcgctcgccatgtctcctcgcacctgtctgacgctagaacaaaagctccaagtgcacctaaagctcaagcagaatcctggcatgaacaaccccatgcccgccgagtggatctacgcaactttcaaggcccgggtcagccgtgccacactcgcccgactgcgcaacctgccttcttcctacttcagccacgtcgacctgagtgcgaccaagcggcgccgagtgaaattccctcagttcgagcgggaactgagggaatttttctttcagaacgaagctaaaacggcgatggcggacgacgtgctcctgctgaaggcgcataagctggcggagcgcttaggaggaagaggaggaacaggaacccgcagttcaacctgccattgctctgagacactgcatggagctggctgcatttctgctgcaatgcggagagcagactgacagagaacgaagagctttacagaccgtgaccactttggttcgagagactacggtgaaggcaaagcggcagcgaactatgcacgatttctttacgtgcaccacataattgttttaactgagtccattttatatgagtcattgtagtagatggtcaccaacagggcctcatataaacaggtttgactgtagtatgcttctgacatgaatacactcccggtcaaaattatacgaacacacacctttttgctaataactcggcttctactgcgagttgaaagctctgctttagatatgttttgtggaacacggtacacaacgtttgttatggtttaacattgtcgatttcgagttttaacgagaagttcacatacaaataatgtttcgggcaagtggtcacaatatacgaacgcaatcaaccatacaaaatcgtatattaagtgatgggtacaggaataatggtagctagtagtgagtcttattgcctctcttttcaatcacttcaacgcacctacggggcatagattcaatcagaacagcaagtgtctccgccgagatgtccttccaggccgtgtagcgctgctgtgagcgacaccactgagtcgtactgcctaccgttgcgatagacatttcgcgccatgatggcccacaggttctcaataggattgaggtccggcgaacgtgctggccaatccataacttgcacctcctgctcttcgaagaatgccatcgtctcgcgcgaggtgtggatcgcggcattgtcttgttgaaagacaaaatctgtgccgtagtgcttgtgcgcaaagggaagcaggtattcggagacagtgtagatgtactgctccgatgcctgtctccccacaagcacagccagctcagttttcccggcggcactaaacctggccaacaccatgaccgagcctcctcccatctggcgccggttggtctggcggacaggctggcgcagatctctgcagtagtgctggaggccgtccgggccatccagattccattttgtttcgtcggagaagatgatatgcgcccagtcccccgggtgcatgatcatctcctttgcccacgccagcctcgcagccttgtgagcgctggagagctgcagcgtgttctccatcttggagtacaccagccagtccaccgctgaaagcgtgcgccggacggtgtgagcggagcacgagagcgagagttggtccttgaggtgggcagcggaggtgtctcctttagcagcggcgcgcacgagacgtcgtaccgacttggccgacagcttttgcggtcttcctagctgcttcttctccttgcgcggattttgtagccgctgcacgactcgccacactgcgtttactgagcgcttgaccttggccgcgatagctctgatgctgagccctgcttcgtgaaatccttggactcttccgttctcttgagctgagagcacttgccccctccccatcactttaaggaatggtattagctgaacgccacagggacgtcgttgctacaaaccaatttcccctacaacaacacttaaacaacaagaatcataaccaattttacactgaagtacacgctttcattcctgtactaggctagcccttcgcacacaactacttcgcgtaactcgacacaactcatccacaccgacaaagtgctcagagttgcggcagcgattctcttaggatcgacccccaaaccatccccactaatcacaaatattgccaaatttccgtaatcggtggtatcggtaagtagcaagctcaaaactgaccgcgagcgagccgcgaactggaagatgctgttggtcggtacgtgatgctacaggagaatgcaagtttggtaacagtaagtttttatcctagactgtgtttattgtaataaccggccaaaatgcccacctgtagcaaccgcttattagatctcaatcacctaattaatcagagtataaatcagggtataattcgattgtgatccatatgcatcgctaggctgcacgattgcccagtaaaaggtgggcattctgctccaaacgcgtctatatcgactggtttcacattaatcgatcgtacccactcacgtatgcatcgcagggacgcgatcgatttacatatcgatcgagctaaatcagggtgctaatcaatcgatttacgaccaaaataggcaaaagaagcggttttcacaatataacttgcatacttaaagtaatgcaaaaaaccggcgccaatataaatacgtaagccctcagtttcagagctagtttaaacttttatcacgattgattctttcgctggcattcgtttctagcaaattcgtaagcggatggaccgtagcacttcaaatatcgtaggttgaaaccgaatttgcactggctgtgccaattcctaagatatttatcttactttcactatcgtcccccaccatacccattttaaatcctcaaaagtcgtacccctattaagctaattgggggaaatgcaggaattcccccaattaaagaggcctgactataccttgtgccgtccgtcgatcgatcgattttcatcgaccatagtagggtacattgaacagttggatttcacactccaaaccttcgtagtatccacgcatggtgcgcgagagagcattgctcctgcttaggttgcttggttcgtggtcgctatttgagagtaaataacaacgttcgaagtatccaaaacttgggcgcacgaatcacttgaagaccagcgattgtcgcggagatttagtctgctcaggtgcgtattggtgataatagatacgatccagagtttgtgctcagacacaactcatccgccgataccacaacctcctgcccatacagcggagaatgaggcaatcaccggaccatcgcgaagggcggtttcaaatgtcaaagccacctcttctgaaccgaaacaaggatagtttagcgcaccagcaatgatgatgtgccgtgatgaagagaattaccgccttatctttcttgaacagaacatgaaaacacaccgacttggcttctacgtaccaaaacgcgctgtccttcctatcacaacttcgacgagcgggatcgtagtagccaatatgtatcgctgcgagatggtacagtgtagaaggaattcctatcgtgttgaacgcgttttcgacggatcccgtgacgagccacaattcctttcgcggctttggcatgttcactagcacacgaatgtgcccctcggccggttgaaagttctctccgaagcacgtggggttcttgagccacagcaatggctgcatctccacgaaccctaccggccgcccgtggtcattgagcaccacagtcgcacgcagccattcttcgacaagaagagctggcgatcgaacgcggcgcacgtgacgtggaaaaacttcaatttgatcttgttcttcaagatatccccaccggcatgccctcgtcaatgatggtagcgaacagtgttcttccttcggaccaagcaatttaccatctctcctcgacgctgtcagctttgaaatgagatgcattacccctttgaccccacgagtgacgtttggtgacagcaatacatctctattacagatgcaaagtgacagaagcccccttagatactttcatgggcttgctgcatctcttgctgctactcaccgccttcagctccgcgcgcgcgtggctgcgcggcaacgacggacgtgcgcaatgggactacgagtgccacttcgaggggctggatctggtgtcgctggaggctgagcccagctctcgctgcgccgacttgtgcctcgcagagaccgactgcacgcactggacgtgggcgccggagggcgacggcacgtgccagctcaagcagggggccactaacgctgtgcagccccacgctgttcacctgtgcggcttcttgccgaccaggttcgttccagatgaagcgcaggccttcgacttggggctgagcctcacagaggacgaagacgcgtacgacggcatgacggacgaggaggcggagacggcgttgcgggtgctcaactcgttccgcagcaagcgtgggaagaccagactcgcgctggacgcgagactgatcctgctggccaaagagctgtccatcacctgccgagatgtgccgctcaccggtagcatgaaccaaggtgacgggtacgagttcttccccgtgccgccagcttctgtgccgtcgaggggcgtcacgggccaagtgcacgccgtgtcggttgctgcgccgctggacagctctgtgaggcacgcgatcgagtggtggatgagtggagtggaccccaagaccggcacgaagcctttcttctccgatgagatgacagttgtgggctttgccaaagggagcgctggatcctgtcacgatggaggtgaaggctctgcaactgacgccatcgtgtggacgatgctgctggctcaaactgaatgacaacttgttaacgaagtcttagcgcccgtcctacacagtcacactatctcgacgacacgtccattccttacagagggttaacagtctgcgtgaacttgacagcagcgtgccacgccttcatcacagcggccttggtggtcgggtcctcgaggtccccgcggttcacccagccgtggataacgtcggggaagtccacgacatcgctgagcttgccgacgtcggccttggccttgaggatcttctccacgctgccgccctcacgcacgaagtccgggtcgttgccggccgacagcagcagctgcggcaccgtaatgcgctccgccagcttctccaccgacccggggccgtgaatcctgttctccgccgcccagctcgggtggaaggacacgtggcccttgatcatcgggttggcgctcgcgctctgggccgcgcccaggtagccgccccagcagtagccgtagctgctgatggtctccacgccggcctcctgctgcaggtacgcgatggcgtcggcgatgcgcgcgcccgcgaagttgtcgaagctgtacttgttgagccacgcggccatgtcgcccttgttgtcgggcgtcttgtagtccccgtcggcggcgtccacgaccaccaccgcgtagcccagcttgcctagcgcctcggcgtcttgctggacgcggccgctgtcgatgccgaaaatgtccgggagcgacagcacgccggccttggccttggcggggcctgtcacaaagagcttagtctggcggaaggtcttgatcgcgcccgaggcgggggcggtggccctcgcgggctccatgttcacggggcagcagctcattcttcggcgacttgtgtgcggcgcgtagacggcagtgagaggctgcctatcatttgcgagcgagttgagacgggccaacggcttcaaccccgctagtcgacgccatcaagactgcaggatcggcaccacaccccgagaaatggcttcaacgtggagctgtctgggtcatgcttggagacacctcatatgctgttcgtgccagcaataatagtaccgaaatcgtacgttgcgccgcaactcgcagccaattttggcagcaacgaaatgtgcgccatccctcgcgccatttaccattcagttcaccaaagcgtgagtcgacgtcaagcgcagacgttgccactcgcactaacatcaagaaccgactgacaaacgcagctattctcggtccttggtgtcgcgtaaaactcgatcccagcgattttgaccaagttagtcagcgcgcagtcctattccctcctgcagacagcaagagcagcagcgtcgccatggaagaacgaccgccgattaataagcgaccgcagatgcgcaagagcagtttgggggccacgatccgcaacacaggcatgtccacacggcacatttacgagatgcaggtcaagacggccaactacgaggccatgatgcagcgcttccagctgcgcaaagtgtcggacatgggattggcgtcgtccaagttcgaggccgagaatctcgtgattgacaaggaaaacgggggcgtcaagaagaaaccgagacacgaatcggtccggttctcgctgcagcggatgatacgttcactcaccaggtggaagacgtggagaaagtttttccactcgcttgggtcaccgatcacccccaccagtcgaatcgccacagtgcacggcatcgtcatgttttttacctaccacttccaactcttctacttgccgttcggaccggcctactacccagacgggtcagcaggcatcagagctgttaacgtcgctatggagctgatgttcctgttgaacctcctgctcaatttcaacactgcctaccaagaccagaacacgctggtcacttcacggaaacttatcgcccgcaactatttgaacaagtggtttattatcgacttcctgtcggcgacaccgcgctgcggattgcagtatctcatcacgggctcgctggaagagaatacgcccttgattactcagtctgagactgcgttgatggttcttcgtgtactgcgcgtcacactcatcgagcgtgctgttctgctgagtcgcgtggtgcgaatcagcaaggccatggtggcgtggctccggtactctcgattctcgcatttgctaggaatcgcacagctcatgtggctggtgctgctaattgctcactacatggcttgcctttggcatattgtgtctgaaagccatgcgtcgcagtcaaggcctattattgaaaaatacgttgcagattactactatgcggtgagcctcattcaaggacaaggaaatgtcgtgggctcgactgacgagaatctgttctccacggtggcgatcctggtcggatcggtcatactcgccatcgtgttcggcaacgtggccatgcttgtgtcgaatttcaatgccagtactacaaactaccaccgaaagatggaggcggtgttcgccacaatggacaaaatgcacctcccggacaagttgcgcgaccgaatccaccagtattacactcacgtgtggaccgagtacgagtgtctagacggcgacatcgtcaagtttcagcgggaacttacgcacactcttggtctggaggtgggtctctacaagtacatgaacctggtcacggagattccgttctggaaagactgctcgccggatttcgctacgcagataattctgaacttggctgtgcgagtttatttacctgacgactatgtcgtacgcaagggcgagacttgcgacgagatgttcatgattaaccgtggaatttgtgcgctttcgtatacctgggactctgaaagtgagagcgaggaagaggacgaagagaccgactctggtagttcaaccggctccacacggttcactggacccgagtcctctcgtttggcgttcaacaaccaggtgcgaggaagcgcaaagttcaaactccaatccgattccaagtcaacttctgcggaagattcgagctcgcaggttcgtccacagcagtaccgactgcccggaggcgcccttaagccgtcaacatcaatgacgacggaccgatcggtggaaaatgctgaaaattgcgagactcagctcatgtatcccggagagaccacgggagaaatgggtttgatcatgaaccacatgcaggctggaagtattcgggccgtcacgtacgtggaaatgtgcattctagaccgagccacgttccagcgtctgatttcgcgctacccgaaagaccgacgcactgttctcacgcatttgtttcacgacagcatcgaaaaggggcagtttcccttttcgtgggacgagatcagcgacgtcgtgctggaccaacgacagcgaagaggcgaccttggagccaccgtgaataatatacacacggcaatcactccagctgaagcagctcaagcgctcgtagatcgaatggatgtcgagctgcatgacaaaacgatcacgttcggtttacagggctcggataagcccttggagcagcagttgccacccgttcaaggaataaacccgggcaatacgcgagcgacagaagcgcgtagtgcgattcaaatctctgcccctgttggggagaaatacgacaacagtagtcgtgacgagctattggaaatggtgcgtgttttaacaggagccatcgccagaatggaagatgacctcaagtcggtgaaggaacggtttgatcaacttcctactgcggcgatagatgtaccaagctatagtgcgatgacagcaagtgtttttcctcctactgcccgcaatgctgcaattactgtgccacgctcacttccacctagtaaacggctggcccgcggcaaaacctcacttgatgtcgctacgtcagcttcaggaagtgtgaagaccaagaggagtagcagtgcaaaagacataaacggcagtgttgtgacggggaatgataagtttttgccaagggaggtagcttcccccgcacctgaccctgaccaagacgtcgtcgctgacacattgccatttgaaagcaaaccgtttgacgcgacaccaagcaagccagtcttgctacatccacgctcgcggttatcagtgatcgacattacgcctcagagaccgaggccttcgcagcgacgatcgtcgattcgtcgtctgctcagcacgaacttgttcagtaagcaagtgagcggggccgtgaatcctacgagtcttcgtcactccaagtcgtcgggccggtctcgaggccctgagctgtcgctggcagatcagctgtggaaccgacaaagtagtgacagcaaaataagtgccgatagtccgagtcaaactggggagacggcgactgcagcaagacacgctggtcgttccatgcatcgatctgggtctgcgagatccgacagcaacttcagacgccgcgattcgcgcctccaaagcttccccgagtcgccactggatgccgaagatacgcctggttcacccgaagaccttggacatgaacccgaagctgcctggcagaaccaggatagtgccgccaccaaagacgagagtgattcaagtaaagaaatttttgcttgacagagcagagctgcttctgggcattcttcgtctttgccacaagctttgcggggttctataatgtaaatgctgcggcccgccgccagcggatccacacataatttagtgtcgcggcattgtgagccacctagtattaggatcgcggtgatatcagccccttcggctattgcaaattctactttttcactgaaccagtaaatgcgtttcctcgctgcagcgtctgtgtgggtgcttgctatggtggtgtgcgaatcgactgaggtttggctgcttgaaggggatgttacgttccactccgcaatcaaattcaactcgacaaagctgggagcgtgcgtctcgctcaagacctgcttcaatgaccgcgctcactccgcgatctggacgaagctcccgaccggagatcagctcgtgttttacgatgacgcgtcctgtaccggcaagcccgtagctactcctacggtcgccaatggtaacatcaacttctttgacgaagcggtcggcatggcgggggaagtctcggcgttcaagacgtggaaggaggggatcttggaaagcccagcgaagatcgtaggctattctacaccggagcgtacgatagaagaactcatgtccgctggaccggaaagcctgatagcaagttcggagtgcaaatgacacaatagactctgtaaattcactgctttactcgattctctccttctcaacgcccagcattgtccagtacgctagcagtcgagttgatcgcaagcctctctgtgtcgtgatcctcgcagatattggtcaacccgttcgtggcgtatatccccgacgaccaaaccatgaaggacgaaacgccgatctcaaaccctccgtccttgtacttgagcgtcccgcgcggcgtcgcagcgaccttgtagtacttgccttggcactcagtttcttcgtacaggaccaaatggccgccgtcgggtagcttcctgaatatgatcgaatggcaccgagtagcagtgctgggtatcgtggaacgcccaatccaggtagtagccatcgatattggggccgtcatataggtagatatgaccggcatcagtcgacatgatcgcagtggcaatcgctacgatgacgaccgtcaacgacgcagcaaacgtgtgcatgagctttagtcgggtcgtgggctatctggaaatggggataacgcactttagcccgtagcaaaagcgccgaagcatccaaggtccaagcgccttgtccacaatttacggaccctttgctggcgcgaagattcacgtgaatgacgacagggccttggctttgagtaggatataccagacagacatgacttgttctgaagatccgaaccttgtatttcaggtcattctgcaatttgcatccgggatgtccatgccaacctccaccgtgttgctgctcgccgtcgcgcttgtggcttccctcctgtgcctaagttctgctgtggagctccgactgtttccgaagcaacccacgtcactcaaccctcgctacaagaagttcaccttctccgagacccaagtgtgctactcgctcgactcctgctacggcaacattgcggtccgtgctgcttggttgaaggctactcatggctatcgcttcgtgttctacgacggcagcgaatgcaccggcaacgccctccgcgtttctgacattgtcgccaccggcagcgttgacttctccaaagtgaattttgtcaacaaactgtcctcgttcatgttggctggagcaaacagttacgctgttgaaggtctgaaggacatttgcgagggtgaagatgcgattctggctgaacctgcgtcaaacattaccctgcagggctgaaagttgttggatcaacacgtcacgaaaagcagatttcaggcatcagaggtattcgtgaatggagtgaagttcttaccttgaattgataatctgtatcctagcacactaatctaggtgcctcaactcatgatcgagctgcttggctttcctggactggcagcaaaagacaggtgagcagggctcagaaaatagttttaatagaattcacagttcgttaagagcatcttaggactgtgtctagtacacgtgctttcggatttgtaccccaggggtactattccccccaggcctaattttatttctttccccatactaaaccctgtattattcaggccgatttttttgtacccctggagtacaattgtccccccgagtacatttattatttcatttttgcgttacttcacttacttcacttacttttagcgccacttcgcttacttaaaataccgggttttattgttactttacttgctgttacttcattgtgtacattacacgactacttactaccagcacgcgcgcgcgctgaccgataccgccgaataccggcgaataatatagggaaatgtatgccgggctaacagcgtgctaaactaacagcagagcgtgctaacatcatgctaccgtattgcacgagatctctgcaaccacggatttgatgcaaccgtgcgtaaaaacccaattcacgacgaaaataattaaagtgacaccccttctgtacaaccaacatcaatttttattaaagtgaaaatccacgcagttttattcagtttcagactcttcttcttcttctacgctaacagactcacttgtcggctccggaactctgaaggtgccgtcagcctctcgcggtccgatgggcacgaaccctgcattcacgaatcccctagcgatacgcttctcctcaatactttcccacgccaacagcacgatctgcgtcatataaaaaaaccggggctgtcgtggtggcggggaagtcgtggttgatatcgtagttaacgtagagtcttcggcatcttgacttgaaggaacgcatcactgatacgtccatcggttgagcgagccccgtgatccctggtagaacaaactctacctccgagcagtaatcttcctccaacttggcgcgcgcacttgccattttatacgtttttaggctgtccagcaatagaagccgctggttgcttgcttcaggcccccaaacctacagttattaaaacacgttagcaaaggtaacattgaaatattattcgcacggagtatgcatttacctcatcgatccagtccagcatcatgcgctcgtcgcagtatgctttacgctgcactgtgagcacgacccgattgcggtgcagggggtggttcaaaagctcttggtgcacgtcagcattcggaacgcctgcgaatacaatgagcggggcatcttttttcctgttgccgacgcacacaagaaaacggatgcccgaaatgcattttccgtcatcgactggaccacgtcgaccgtggtgtagcagacgtgccaaaactcgttagcttcccactcccacaccaacaacacctacactaacgggagcgcaggcttgtcgggtggtccgaagatcgcccagtccgtttatagcggtgcagtggttacccaggcacctgccaagtcgtcccaggagccgtgccacgagcacagagcacgctctccttccttcgccgacctctccttgtcgcttcttctccttctccttctctccttgacccgtgccctctaccaaaggatggacggcagctctcgccttttacggggcgccgatgcaaaaccgcaccggctgagtcgggggcgggccgaaaacccgcgctcgtacgctcgacgagctcttcgccaggggcggaatccagataaccactacacacactcgctcttggactcgccgggcggttgagaacacttccgtcacttcggatagctgatctcagcggtggtcatgatctagccccacgggggcggtcgtaccttgaagagacgccgcgtgccgcttgtttaggacctcgaaaattccactctgtatttatctttgctttggcgggctcaaaggcccttccctggggttcctatacaaatatctaatgaaaatgggctgttacggcctctccaatactaaaaccaagtcaacttgctcgccgactcctcgctcgacgacccttgagatctttgggatccagcgtcggcgatactcctccagtcggtgcccggtgtacacactcggtccggactgactgcaaccaccgacctgcggactcagaaatcgctataccacaaccctcttgatcgggacccgaaccttgccggcgagtgtcctgatcatcactctggacagtgattttcttctctccatcaaacgccaactgtcggatcgctgagcacttcttcgccgacaccatgggcgatgctgcgtgcgacaccgtgccttctacgccaccatccgtaagtcttcccggcgctcgtcattttgcccgtcgacctgtctgctcacacgtcgttgcatcgctctggacagtgcgtgacaggctgcggtcgacttgatgtcaagcccgccaccggcaactacttcgcgccgctccgttgatgcttccccagcggcgacactggacgatggagcttcgcttcatgtgaaagttgagaacctccatgcttcatctgcatcagaagacccgtcgtcggttcctgcgtcgtcgggtgctggatctgggacgtcggtgggacgaccgctgactctcgctgacttggagcgcgttctcgagctgcgcgacaatcggatggagttcacgatggccgagcgagagaccaagatgtgcaagttgcttgcgtacttgttcgccaagccaccggtggatccatcgcctgagctgaatcgtcgactccagaacgcgtcgtcaatcgacgagttgctaccagcgcttgaagaccaggtcgacgatggacctcgccctgctgcagtcgctggcgagaaagctgcggaagcctttgctgaacgcacgcgcgcagacctcctgcagcacaacctctgtgaagcagccaaggagatcgccgccctccgcgaggcagctgcgacatccgatgcgctggctcgctcactcaaggaggaggtggttcgccttatcgccttatcgactcgagcaacgaagggcagctcagcatgcagctgctggacactgagcggatgagcttcctcgccgagaagcagcttctggaagccacaatccgagacaaggatcagcttattgctgcccaagtcaacgattataggcggaacactgggaatcgtcagctgctcatcggccgttgctatgagctctccactcagttggctcagttgtcggacgccatcctgatgggagatgggtctgcgaaccagtggctcaagcgtcagctcgctgacaaggaccacacgatccggaccttgactcgctgcaagaaattcacatccttggtcagcgaatttcagtagcagagccccttcctggcagtcgcagctatgttcgataagtcgggtggtgtcttcatgaatctcggtgttcccttcgtcactcatcgaacttgttgcgttgtaggtcaacctatgcctggcttggaagccgatcagctggaggcatttcgtgacgccagcaacttgcttcgtcaagctggcttgggtgtgttcggtgaggtggagcagcacgtgcagactccgtctccgacaccgactgccccgctaccaagccatcctgtgcgttcaacggtcagggccaccactcgtgcctccacttcaagtcatacaccttcgtcgagccgtgaccgatctcgctcgccgagtcaagctactcctgcggctgaccgccgtctccgggctcggtcgtcgagcgtaggtcggtacttgaccagggctagtcgttcgctgagcctttccgctcgtagcgtttccccaccggctgcgtcttcgcgtagtctcccttcgcgggtttcagctccttcggcgagcaatcgctcacgctcaccatcgtctgttgtcgttggttgcaagcgccgtcgttcccgtgacccagacgacgagtcagcacagtcaaccgaggctccagcttccagcagttcgccgacttcgcccaagaaaccaaagaagagacggatggctcgttgggctcgcatccaggaggctcggcaagcggagttggcgaggcagggctctgcacctgctcccaagaagcagcgctcgtcgaacaagaagagacggtcaccgagtcccgcgagcgagggttcgctgactgaggagaaagctccagtgcctgctgctgctgagcattctactgggctggtcgactccaccccttcgccttcttcccggtaccctcagcgagcggccaagttgaacgccgcggttatccagcgggaggttcttgctcaggaatctgacaacgactcggtggtgctcggcgaagcacccgtcgtactgtctgtcgatgacgctcctgcgggtactccatctactcctgttggttcgtcgatgccttctactgaggaagctgtcacctctggagttaccgaagaggtgggcgagacattggagggtccagttgctgttgagagttcacctggcggctttacgtctcgcgttccagccaaatctcctgctccttcgtcggcgtctgaggctcctaccgaggagttgtattcttcagcgcccgtcactcctgtggtcggcgaggcttctccggcgacgcaagtcgaggcagcttctactctagcatcgctgagctctgaggctccacccgcacttacaacgagctctgtcatgatccgggtcctgcatcctggtaagcatcctgcttggagtccggggagtccggacgaagacgacgacgctggagatagcgacagcgatcacgatgttggttcggcgggaggtagccctgctacaacttctcccaacttgtcgggccagccagtcgcacctccgggcaagcctgtcgttggctctgaatccaatgatggcggccatcagcaagcttcacctggtcttttaactccgcctggttcttaattacctgaccggagttcgaccactgctgccagctctgtcgtagccgatcatggggatgaagactcaagcttcgctgagccggcgctaacgagcacgaaggactccaccggcaaggctcctgtcaagcctgcaggaccgtccaagaaggttccggtcaaggctgcttccgctccagcgagcaagaagaaaaaggctcggcgaaggtggtcaagtcggcgaagccagctactcgttcctcctcatccgccgctaaaactccggtgggcgaatctaagcctgagattgtgagggtcaagctcgagggtggacctcctcctctcttggtggatgtgaaaaccctcgtgcagcgtgcgtcgaacgagaccagtcgggactctcgcgagtcgaagtacatgaagcggctccggtctcttccgttcttccacaaggcttcgcgtcgctgctgggagaagatattggcgtcgtgcgtgccgattgcggtcactgagaagacagctgacggcgttcgaatccagcctacgcctatcagcttggctggccttcacgctttcgctaaggtcgacgaccccaaccacccttagcgggcgattttccggcttcttcctaggagcatggtcttcgttgaccacacagtgcttattgtgtttcctcccgtggagaaagggaagagatcgcggaaagcagagacgctcctggaagcgttaactctcgctttatgtcggtcttgtggcgtcgttcgttgggatctcctcttggcgctctgggaaagaatgcactggatcgtcgagtccagcctctacatctggctcaccgaggcatggttcgcctcccagcagactgccgagctcgacgaggagttcacccagctgtggttgaagttgaaggagtatatccacgaatgtaagcagcgttccgatcttctgcggttggcgatgaaggaatacggggacgccatcgtggaggctgtgtcccacgagatcgatggtagtcctgcatcgttgctggacactgaagtgtgcttcgatccagccgtcccgttctgtccgttggtaaacctcccgtggttccccaagacgaaggactgggtcgccgaggttaaccacatcgacagcaacgagccgtggcgaaactggtggttgaccactcctggccgtcacccctacaacacgatctttcgtccagcgcatccggacttcccgctgttcgttcctgctggagctgatccggaaatcgtccagctcgtggctgaggctgaacgggaagtcatcgagcccgtgctacctgcgctccacccgaagaccaggcctccagcgaatcgcccaactctggttgagttcctgccgccaaacgtcattcacgctgcctgattttcattcgtggcccacgtcgcgcgaaacatttgtcgagcttcacatagcgttgagacggagtttttagttggaggcgctttgcatgtagtagttccgttgttctcttttccgcgcggccacatttccatattaatcaagtcaaatcaaatcatgcagttgttggtacagtcgagatacactcgacgagggcctgtacctcaccctcgcccaggtcaacatgtgacacagtaacatcaatcccttgatcggcgacctgtgtccatcgccgagggatacttcgcgcagttgctagtcttcgtcagcaacttgaaccatcttgaagcggttctcgcgcttgcgctggaggagatagtcgaatagtagtcctccgcacgataaattcgatactggttcccaagtcggctcatcgtagccttttcacttgacgtagaactttcgctgggtccgttccgtggctgtcgaaattggccatcgatcgtcgaggatggcttcggcgatgtacttgtcaccgtctccttccggctcccagctgcactccggtagaagtttctcatcgaaatcaaacctctcatcctcgccgagcccgtcgatcagctctgcagtcggtctgcggtcatcttcgctcactgccttgagcctggacacgtgcaccacaggatagaagcggtaaccggtcttgtcaggtagctctagctcgtaggcaaactcctccaccttccgcttgatgcggaaagggccatgccacctgtgagcgagcttcttggtcaagccgggcttcacgcgctccataaacaaccatacccggcttcctggctggaacagtgagcgatggaccgattttcccgttgattcgtcgaccgttgctttgccaggatcgccacgttcgtcgagcggtacagcaagccgttcaattcttccaagggcttcgttgtgatctttcgctagccgagccttttcggtggcttggtagtgtttcgccattgccagagcaatctcgtgttgtcggctggcctcgcgtctccaggctgcagcgtccctctgatcaccatcgtcgagcctcaacgaacttgtcattgccttgagtgtcgattgggcatcccatccgtgggcgaggaagaatggtgtctccttcctcgttgtgtccatcgaattattgatcgcgtacaccatcttctcagcgatctcgtcccagtcctgctggagtgggtcttcgacgtacacgttcacggcttggatcaccgacttgacagaccgctcctgctgaccgttcgcttggggccggtagctgagcgtcgctctagacctcgactggatcagctcgaggaatgccttgaaggtctcactcatgaagcgtggatcgcgatcgtgtcgtatcatcgagggggcaccaaagcgtcggaacacatattcctcgaaaacatctgcaacgtcttgtgccttggtgctgctcatggctttggcgataacgtagccagtgaaggaacactggaacagcaacagagacgtgttgcctcgccgagtcttcgacagcggcgtcacgaagtccatcgataccagctggaacgggcggtcggcgagcacattgcccggcgaatacccctcaaaaaggggtttgcccttgctggtactgcagtctgcgcatgcgcgcacatggcgagccaccgtggcgtacagtccaatccagtagtaatctttcttgacccggtggaacgtgcgcgttaccccttggtgccctccttcgatcgagtcgtgacaactctgcaggacttcttcaatcatcgccgtcggtatcaccagtcttaactgaggttccggctcgccaccctcgtcgagcttgcgtcccttacccacatagtgtcatagtgtggcacgtcgtctccgtccaggacgaatcggtcggcgagtttgctcgcattggctgcccttttgaagtcgagggactcaatgtcaccccggaggtacggcccacctcctttcttcgtcttgggcaatgcagactcgccgtatgcgttctgcttgcaccgctaccgggtctggttgctcgtcaacttcttcaggagtagcaggagctggtccgttggtgacgatgtcgtcgtttgcatcttgcgcttcgtttgctccgctcgccggctctgatgcgttgtctggaggggttggcgtctcttctggctctgtctgttcaacctcctgacttctcacgtcaccgtggttagtgtgccgttgcacttcgggatcttcgaaccttactctccgagcttgacttctggtgactgcagttacttgaagttcttcggtgacctcatcagcacttgaaggttttgctccctgagtggtttccgctcgttgagtgttccgctctgcctccagtgcggcttgctcatcgacatacagcacctctggaattcgattgagctctttgagctccgccttccttgtttcgctgagtaccaccttggtgacctgggtttccagagcttccgtggccagcgagtcggcagatgcgttatacatccttatggcgtgcagatagcggactgagttgagcttcgtcgtgagttccttgtgattcttcagctcgacttgcagcgtctccttccggcatgctatcacccccatggattgctggattgcatccctggaaccgccgacgataataagatcggtcaccccgtgtttaatcgccgccttgactccgttgttcatgccagtatattcggctagattgaccgtcgtcgatggtaggtgcgcactcgcagcgatcacaatgtcccaagccggtaagcgccacaggatccacgagcagcttccatgtccgccatgcttctctgtcttcgctgacccatcgaatgatagcacatggccttcatagtctcgagggatactcgcgtagagcagatgaggagccaatcgcacggtcgccgacccttttgagggcggtgcaagcggggccactgcttcgtcgagcgccacaaagggtgtgatcgacgactgcagcagcttggcgaattcgatgtcacgctcgcggactcgcttgaccttcaggtgccactgcgacaggaacaccgcgaattgcaccgtcctcccgaataacgacttggactggaacacccactccaaagttgagaacctggtgtagacgtgcaacgtcttgccggatagcagcgtatagcataccttgagcacctgcaagagagtcaacacctccttttcggcaggatggtagttgagctcgttctccttgagcacccggccgcagaaccgcaccgggtggagcaagtcgtcatgcatttgcatgagcgtactgatcaatgcccactcgttggcgtacaacatgatgtagacgcccttggagccgtcgaagtgccgcaggatcggtgcctcgacggccttctggcgtaacgctgtaaaggcattgcgggcaacgctgaggtcaccccccggagcgaagtcgtcctcctttatctggtacaacacagctccgtacacggccaatccctggatgaacctcccgtagtagttcagggcatccaggaacgcctgcattcctttcttcgacgaggggaacgggagctcagcgattgccgcgagcttctttccgtctgcctggattccttcgcccgtgacaacatgcgacaagaaatccactttcggctggacgaagatactttttgtgaagctgacgttgatcctccggcgagggccaggtgatccacttcgaatttcgtccgcaggtcgcgttgatcgacactcggcgacctctgcgacttcaccacaaacgccttacgtagagcttgagccttagcctctgcctgcttcattcgctcggcgaaagcctcccagccacctttcggttgcacgtagccccactatgcgttatcaatcatccgctggtaaatcatcggcgcgttctttaaaccaaacggcatgcgcagctactcgaagtggcctagcgcgcagacaaacgccgacacccaccgagcacgcatcgtcatcatgatcgtccagaaaccgctggcagcatccagctaacaaaaccacaagtagctctccatttccgtgagtagatcgttgaccaacggcatcgcatattccataatgagcgtaattgcgttgaccatcttgtagtcgatgcatagccgtatatcgaggccgttcttctcgagcacgattacgatcggcgcggcccacgggctggatgcgaacgcaatgagtcctgcctccagcaaccctttcagcagctcatagagcttctgcaagtatttcagcggaattcgctgagctctttgcttgataggggtgtgtccttgaacatcaatgtcgcacaccacaccatacgcaggcggcggtagtgcgttaccactggcgatcatgatctcttcatgccggcgcagtgtctcgacgagcttgatctgtccaattggatccagtgaggggttcttcatatttggcgcatcatagtccaggatcgtcgaggcaggcgcgatcaagtccggtaagaaggcgagttcgtgtgcgtaatcttcaaagttaatctcggttgcttcgtgctcgaactcgtctccatccacactgtcgccatctgccatgagagcctccgcggaggcgatatagcgaagtcgtaggtcgtcgagcggatcgtcgctcatcgattcttcgatctcgtcatccatctcttgcagcaccgccacggtaacgtacacagggtcagtcacacctcctgttccgtcgagatagacacccttgatgaggtctggtctggcactcagtgtgcgcatcccatccgcttgctgtcggagcatgcttatcaggtgagcggtgttatcatcgtcaggcgagaaccttgggtcttcgtaggcgacttggacttcgttcgcccaccgaatttcaccaaattcaccttgaggagtgacgcgggtcgcatagtcttgttccccggcgtccataggacagcttaccactgttgcttcctcagacttgtcgctcttgccgcaattcggcgagatttcatcagtcacccctgtctcgccggctccggtgtcggatagctcgccgagtcgattccattgttcatcgcaggtaggacatcttggtgcatcgactggtcggcatcgaactccagcaggggttgcgtattcccgcttctcgactgctggaggttgcttcgccgaccattcttcatagatgtgacgttcgtgttccagtagatgcttcgccttcgatgatccataagcctgtatttgccactcacgatacttcttggtatgcaattgcacgtatccattgctgagcggcaggccctcgtgcgggatccaatacacgaacgggaagtgtgccggacaggacaccagtttgtccgtgcagtttgtcaatcgaactctcgtcggttttcccgacctgctgaagaccactgtcggcaacagatctctagcttgccgagcccatagatcgtgggtcgcccagcttggtcggttcttgggcaacttgaactcaacagtctcgcccgccagtacttccatcgtctccggcgggctcgcagctacatgttccgcagcgctacgctcgtcgacttccttctgcgacttgaccagcggcaccaccacctcctccgggttctgcatcgtcgaccggaagaggtccagcctgacaccggctggaattatgaaatcagtcccaagaatgacgtccacccccgcgtagtgaggcatgatccagacttcaaaatcgtaaaccaactcccaacccagtgtcagcttgaccttcgcacgttcgttcgtgtagaccatgtccttggcaattccttgtatgtccagctgcatgtccatgttcaccctgcgtctcagccgtattttcttagcgaaaaattcgctgaccgtactcacgttcgcgcctgtgtccagcaaaatcttcgttcttctgtcgttcactgctcccatcacaagtgctcgcatccgctttcgccgatcgaactgtttctgcgaccaccatccttggcgctcgcccgcgagcagcttcatcaccttggctcgaggggtcggtctcgtctcacgcagcgtcgcacttgtgatcatcccggtagattcgctgacctcctgacttgaattcagtatggttggctcgtcgaccgtgttcaattttccgtcgtttttcaactccatgtccgtcgcattgtcctttcccagccatttgctcagccgaacaaaggcaaacacgaagtttacctcgatcgccggctcagacaactgtggccgcccgtcattgcccaacccagttatagttggcgggcgcgctcgtttaaattgctggaaaatatgccttggagctgggggtccttgtcgtgcttcgacttcaggaatttcaaaaagcttgtggtgcttgcattgaccatgcacctgcgcgcagaacttgcaccgccggaagcaccggtacaccgagtgacgcgggtcgccacaggcagcgcacggtccatactccggacgacctcggcgttctcggtcgttccaccggcttcagcggccttcgtctctacgcccgtcgcccgatacattcgcgcgactttgaccgtctgatcgctgagttgcgacactccggctcgtctcagccgcgtccatgtgatctgattcatactcggaattatatgagcggtcggaatgattgctgctttccaagtaatcatctgagtcgactcggcgacgaggcgtgagagacatgcggtcttgccaggcgtcatagagctcgtcgaccgacgcacttgcgacggtgactcgacgatcgtagcgaccttcacgtcggctacggctgtcacctcggcgatcatcccggtcgttccgacggtcatcacgcctagcgctgtcggtccgtcggcccccatcgcgtgatggtttacgcgtgctgtccttgtctttgcgacgtcggtctgcgtccatcgtgtcgttgatcacagcttccaccttggcaatgttgtcgaatcgttgagggattaactgtcggaccagcgcaccatcttcacaagtgtcgtggaagcgcttgacgtgccccgcgccgacggtgccgcccgcttcatacgcgattttcgccgagcgagcgtatccattcaggcgcagcaggtagtcgcagatgtgctctccctcgtcccgcgtggcggtgtaatatcggtcttcggcggattggtcgtgctgcgagcagtagtacgccatgaacgcctcgcacagcagcgcccacctgttgcgcgttttcttcgggagctggcgaacccagttgctgcctccactctccatgaggagctgaaacggctcacaccagcagtcctgcggggtgttggtcccctccatctcgtagatgaacttcttgagccaccgcagcgatcgcccaacgcaacgaggcttcgtacgccccccgacgtgatgctgaggcgaacgaggattacttcgaggacgtgcgccagtactcggatgactaacgctcggacgaggattcagacgccgattacggctcggacgagtctactcgacatgtcgctgccgctaacgacgctgagcgcagggccgcagccgatggaacgttcgcccgctctgacaaccgacgcttcaggaacggaggaagcccgtccaaccgcgaacgagatggccgtcgccagtatgggccgtgtgccgcgtgcggaagcccgtcccactccgcgcacttctgctaccggcggtgcaaactgtgcaaacaggtgcacgacgctgggaagtgcgaagcactcctcgacctcgccaagctcctgaagtccaagttcgacaagaaggatctgtcgccacagctgcaaagcctggtgtatggaagccatttaaacgaggcagtccgccaactgaaactgggttggtcccaatcggtctgccacagttagctgagcctgctattgatgcggactatctgttcgcgttcaaaggcgaaagcaaacggcctgacgacctgaagaacaatgatcgtgtgaaaccgacggaaaatggagctgaagaacaatgatcgtgtgaaaccgacggaaaatggagagaaccgagacgcaagtctcgttgagaccggtattgatgaagatgaagatgatgaacgtgatggacacccgaccgaggctttgattacaagtctaacccagcacctcggagccttgttcgggcggtgcaattactgcccggtgagagactggggtggtggtcgtcccagcgatacgacaagaggaagcgaatgagagctttggtcaatggcgccgtggacgacgcgcgaacgaggctacgccttgatactggagcgaatgttagcgtgacttctgccagcttcgcgaagcggctacgtgtacgggaagtccgggacaacggacgaagtctcgaagtccgcggcatcaacccggggtgatggagacccggcgacgggcgctcgtcaagatcactctcgggtgggagcaggcagacgagttcgaaatgtggataattgaccacagtgccggagtggatgtggtccttgggatggactttatgattccgactggaatccggctggatcggttccatggcaccgcacgccttccagacgaggtcatggtaccactgccgaagccgcagagtgttggggatgacgaaccttacggtacgcagccttcgtgtgggccgatcgaggatttatacgtccccggtcgcgagtggcaagagtttcgactgccgcgccagcggcaacttcgttcggagtacgatgtgtgggtacggcgcacgggaaagcttgtgccgaccgtaacgaggcttcgacgggggcagccgacacgggtacgactcaccaatattgcgaccacaacggcacagtgtcccaagcacgactccgtggtgctctgggtaccgcatggtgaactaccgcgagagaccggctacgcgaggttagactctaacaagtaaaaggagtagcaggtgctggcatactcaacgagccgtgacgagactttgtatggaagggagcgatgtctctatgaccaatggctggccaaacagccacccgcggttgagcgcaggacttactcgacgccgctgaagatcttacggagaccgctcggagctacaatatgaccgagaggtcatcttcaaggtcgtcctaacgacgattattcttcgctcggtatatcggatcatgccaacgaccccaggctctcccaaggctcggccaaggttattgagcctggcgcagacgacacagaacgtgatggtataaccaacgacggttcggacgacgaggcgagtgcacggaccgactccgacgcactggaagggtcgtcgcttcaccgagcgtcctatacatccaagcgcaccgatcataacgcctatagcatcgaacatggggcacaggaagccccggccgaggtgtcaggagccggagccaagcgtgatgatggtgttggagagctgaacgacgattcgggagaagatcatgacgcgccagatgtaacagcagcggcggaatccgccccgcggatggccggaacagcgacggatacgaaagcacgccctgaaccagatcaaacgtcggtcgcgtggggcaacgccactatcgactggggtgaacatgatcctggatcgaacgacattttaactgaagcaggaaccgccacgaccgaggttagtaccgatggagaaaactgtgtcgatggcccggacaaagaggacccagaaagactattggaggcgaattacacctcggtcgtacatgcgatggttgcggaagggttcccggaggatgatgacaccgcgaacgagatatatctcagcgactacgcgcaggagtctctaccgacctctcgactgaagcccaccactcggatttggccctgcatggaacgaggtaaatcagacacgagtgctgattctcagtggtgggctggcaaaggtttggaagtggaacggacctgagatgacgtacctaagcgcagacgaacaccgttcgattgttcgtttgggtgatgacctgcacgagtggcgaacgcagcacgatgtttgcacgtggcccaagtcgttgacaagttgcatacgctaacgacatttgaactgcccgcgagggttacccagctcgcgatggtagacgaatgaagctactggaaacgatgattgaactgcctgtgagggctatccagctcgcagcgacagacgaaggaaattactggaatttgcatattacatgtgatgtgaatgagtcacgatggagtggcatgtctgcctcgatcaacaccccagcagatgaaacgaacaaggatgaagctcaaggaagggtgaccgaggattcgagtgccgatattaacgtggaaaaaggtcgcgcctgtgcgccggacctcgacttgagacgatgtatggatttgatgatgaagttgagatatgagtggatctgggaccgctacgcccgacaactacgtttcgttcaaggcggtggtgcctgatggtgcctgcgcggaaactgtgggaaccctgaacgagaattggtgcggctcgaaaagatgtgattgcaacacagcgggtcgattgatcgaggctggggtacccagaccttacgttacgaccaccgagtatttgctgtaagtggatcacgaaccacggtcaacactggtacagttctcacgccaaagaggaagaagctgaaggctcgaccgttgtttctggtgcggtggttcccgagccacagactgaggcaactaaacccgaattggttacgaccaccggaaaatccggatggaactgtggaacgaaggcaacgaaaccacggttgacacagctacactatctctgagtgataacgaagcaagtgatgatgtaaccgacgttggcggtgcagcaattcgtgagcttcaagctggggcaacaatacctgcctcttttacgaccaccgaagttacgacgtagtaatggtgcgaggctggacgagtcatcgcaatttccctgactactgcagttgacgttgaaccctcgaacgacgcagaactagctacagaagatatcagcgacgctgcgaagtatgcggacaatgtgtgacgagcggcggtcagcagcatgtcgatggaacgtcggaccatacgaccaccggaactccggtagattggtattgcggccagaagagtggcagggcatgctactcagtttgaccctcaggtgatgcagcactttctaaagcagacaccaatgtaatcgaggaaacgtagccaaggtgtaaccaaggggcagtgcgcggggcatcgaccgaacaaccaacgtcggaccatacgaccaccggaattccggtgatgtagcattggatggactgacgattgaagaatgaccggctaccgtacgccgttccgattgagtttgacacgctgcagaagatgccactgaaggtgaagtaaacgggaccaagacgcaaacaccggcagtcagcatggtatcggtggaacgaccaacgtcggaccagacgaccaccgaaatgcatcggcatgtgtatcaccgtgcgtaatgtagcggctccaagcatcctcaaatcctcggtggccctagcagaagatgaaatatcactggaggaaccttgtggtgtgttgaccgacacttcagcagcgacggaaggcactggaggctcggtcacaggtgcagcttgcaccgggaccgtattatcagcgccaacagaaccaccggtgggtaatgaaagatcttgtgaccctagccaacgttgcaaagtgtcggtgactacatcgacagcaccctgggatgccggagaacaagctggcgtcattaacgaggatccaactgatggcgaagagcagcaagaacgtccagcgtaccggaccagaacactgaaggtccaggagagcggcggttgcagcggtcaagcgcaagcgcaatgaatgaaccatgaagttgacggacggaaggcgcctagacgctcacctgttgctgaggctcgtgtccaggcgggggcagttgtggtatcggaaaatggagattaccggagcgattgcccgtcgcccaagaatcaaggtacaataatcaaggagcagtcaatcgcgagatggaagtggctgctttggttaagctggcggcattatcctcgttggagtgacaggtagtggccgaagcctcgtcgggttctaatacaaccccgagcgaggcttcatggtacccacttttaggtacagatgcatttagttacgtacttcggccgcacttattagtgtagccgtggtcgtcatatgatgtgtccagattcgccttattgcgatcgtccacactagatatttgtatagggacataggactcatcataagatggccagaacgaggcccccagggcctcagaaaactcagtaataaaaagacagtcttcccccaaagccaacaagggtcaagtccgacttcggtaagtgtagctagcttattgtagtgcctggacacgctcggctgcgtgtggatgcctgtcggggagcttatcgtgcattgaccgagagtttccttggcagcgccaagggttggcgtggccggaaaggcaggaacggtattagagtatcgttcggtatatatttgtggcattagagtatccctgagtgtattagtctacctaccgaggttttaccttggtccccctgtataaggcctaacatgccggtaccctttctttctgagggactgcagtggggttgcgcgaaagcgctacgtagtatcctagcctaagctcatgcctagtggtacaggtttttgggttgaccgaagatagcctaaggtgcacagaggcgcttgcaaccgacccggtgtaagggatcgttcctggtcttcaggttttgatccaataagcgcttacctttgcgggttagcgtgttgttggtgtctctaataccttttggtagaagagaattttagtggtattaccacgccacatttgcgtaacgtaatcacaacttgacctcgacgggattttcttgacggggttttctcgacggggtttagggttgacggggtttgcatgaccgggcgtatgaaccggctcgtatatatattacgacccggatgaacgttcatcccagggtcctttagggtccttgggccagcttattttaggtgttcacgaccccaatatcattcatccaggggccttcgtgtccaaattagcttattttggttggttttttaatttaggctcggcgtctgaggttctctaataactgatagcgactaaaccctaaagctgatattttttgtagtaccgtacaaattatttaaaatatgttgatatcaaactattcttattggtcctctacaatattttaatcgtcatatctaatcatttttaatggcgtgtaagacgctgtatttacatgtaacgcggctgccccgagaagcgagtttcgacaccaccaggcgcatcttcgtcggcggagcgagcgcgcgtagataccgatcatcacgccgcgtaaccgcagctcggtcgtacaaaggcgcgcgtccttggaggcgcgccgcatgtcaagcgcagagtcggcaaactttatccccccccccctccctaagcaatgttggcggtctatggtacagtatgactgcataacgctttgcggtggcgacatggtggccgccagcagcgacctggtgggggccagcagcaacattgatggatacattctccacccgagcaagcgacgcggtgagcggagctgactgctgtgaactggtagacctgagggacgatactggcggcggcaggctgccgatagccaccgttctcggcggtgttggccgttctacttcatgtatgcagtgcctacaaactaccgcgggtcgcgttgggtgatggtggtggtaccggcgacgtcgaataatttgctacgaccacccttcgtatgcttatcgtagatgctttggagccgttagctttgataacgttgcgctcacacggacgagcagcttgcagcgcaatctaaatcgatcacgctcctttttctaatatagcattgacactgttcaggctagagccaacggcgcccgccgtgctggcggaacagatggcatcgctgaatgcagttagtgaccccatttggatctgtcgaatgaaaatatggactagaaagcataaatgtttagcaaatgtatgctctcgtgatctaaaaactgggtatgaggtaaatcaatggcacggtcttctcgtggctaagctacggtcgtgggacaagtagttgcagctcattaaccagagaagagagctcgtatgtatgcccacaaaatgcacaagttggtaaacgagctaccggtgggtactttcacaatccactgtgcaaattcctgtcttgtcaagagggcaatttcaccttctattcctccacgggatgatgcgcgagttcgacatacgttgtaaaaactccatgcacctgggatcatcctcccgcgcagtcgagagttgcaggaagatcccggcttacttccaaaatgaagatcgtttttccaatgcgcgtggtgtattggaatgccacagaaaaagcacgacggatagcgagacccaaaaattaaatgattctcacactcgtgtacaggatgggcaccaaggcacttcaaacagtaggctgcttgatgtgggcatgcctctgggaggtgataaatgaatttcgcttggttagaaacccaacataccacgcaatgtgtcgattcatcgttgaaaatcatttcctgcaacagcatgtagactctttcgtcgttgaggactctgatgttagcttctgcacactgtaaccgaatgcttcgtgacgctggtgcgattggggccttattttgatcatctcccatagctctagagcagacatcgcacaacttgttgacatcgtcaaccgtgcacggaaagcccgaaccgtccattgcctcttgtagtcgttgcctcctgcagcggattttatctaaaaggaatgcccgtagcgtactaagggcttgatattcgcccttattgctcgatgaacccactgtcaaatgcttcgaaaagcgctggaagtatgtttcactgtatatggtgacacattttgctggcttaccatcaggccccgaccgacctgtcccctgcgcgtaatcggtcaagctgtaggctagtccaaaatgtagtacggttcgaacgttcgggtaatccacaccctgacccaatccacacgtcgcaacaatatacgagcagttaggggacttccacaatgacaaattattcttgcgctcatcgaaagtcattccactatgataccgggcgaccacgttggacgtatggcgctctaaatagtttgcaatttcttcgaccttcggctttgtcaacgcaaagacaatgcctttgtcaggatgtgccataggaagtttcatcaatgatagacatgccttcatcatatctgtattcgataacaattccaccacttcgtaacgtatagacgctcggcctatcggcgttctcacagtgacgaaagggaagccaaaaattgtcatgaggtcattttcccaagtggggggaagagttgccgtcagtagtgtcttctggaccgaaatggacgataacacatagacgaatgacatgcacctgcggtaatcttgcgaggtcatagccaagtgagcctcgtcaaaaaatattctgcttagtttgtcctgctcctgtagcgacagtaggaacgtccggaaattttgatgctccaagtacgttactcggacgaacaaaatagacggtagcgctgtgaaaggactcgtatcgtggtgatacttagagcactcgattcccaattgttctgtcttccgaagcgagtccaataaaagtgctaccaaaggcacaacaataatgacaacacgcgtagaattcgataatgcggccaaatgaaacagcaaggacttcccaccatttgtagggagtacaacgagtaaattagagacgctctgcaaaaccagtgtcgttgcaacacgctgctctcttgaccgaaacgaagcagtctggtcacgaagaaatgatcggagcaaaatccgagctggcccaaagtgttccggaagtaagctgcttataacttcgccaatagtaaagaagctgaacgttggtacgacaattgtgattgggcgtccgtgcgtagcaggttgattgaatcttgaaacttgctgcacgggtgacgtcggcgaacttttcctccttggcattatctcggattggtcacttggggcgtaacaattggtactggtcgagttaccaggtccgagaagtttatgccactggtgggaacaagaaacaaattcggccatatcatcgcgcgacataaaatacggatccgtggtagaacggctatacaacgtcgaagccgctgccggtgcatgagcggcttgaaaatcaaacatgtcctgattcgatcttgttgatgtaatgttcttctccatgaatgcgatcgcgacgtgtctgtaagtccgaacagaaagttggttaccgcaacttacaaaattcatgttaattgcagcacggcaacctttcccatttagtctgccctgccctgtagtgctgaagagatagtaaaacaaagcgtcaccttctctagaacggtccgaagtaaagcccccacgttgtagttgagtgaagaaaaattcttgtaccggacgcacaagggcagcatagatcagaaaatctaacgtcaactccggcggcaggaatcgcgcaattaagcgatgctgtcccgatatcgtcggacctttatgatatctttgtatgatcatgacttcacggttcaaaatatatatcgatcgttccccagaaattgtgtttgttgaagtcgaagcgcttagctcggcagctcgtgatggctgccctgacgtgatataaatcagaggtgcaagaagcttcgtgagcttatcaacctttctgcaccactgggacagcgaagcaagtccaaatgtgattttaccattcaccaccttgacgataaacttggagcgatgagtctgaagaagatacttaaccagatgcatacgcatcgatttccatggattcctgtcgtcttcgagaaagctgtatccacagctatagttgctgtagtcgtcgtaacagcactgctcatccgacattaaatgtttttcaaccgcagatatatcgtagcccaaaagcacattttcacgaagcaccttaccaaactggtcgacaagctttgcttttaagtcgtgaagcgtcttcaaggtaacacgatggccttcaactaggagcgcatcatgcgctgatcccagctacatgatttgaggaattcgccgttgctcaggtgccatggcgatgcttgagccaaaacttataacctcctgcagcagattaaaaggagttcgatacccggtcctaagataaaaacgtagcgcctccgccctttttggcgtcgccaaattttgctcgttggcttccacaccccacgacagctgatgaaggttcatcagagcagcaattcgagcccaatactttaagatagcgactaaactagtcagttgaccaggttgtttaaactgtacgtagccagcagcatcttttgtcggaccactgatagaagagcatacaacaaatcgatgagttggaaatgcatgaaactcgcttggggagtgttcattttccaaatcaattcgaaaaatcttttcaagggcaccatctagcaatacaagttgttcgacacaaacatgctccgctctgtagtgctcagtggagatcgacgcgaaagcttcggagcacgattggaacagagagtccacttgatcagccagatcatcatctgtagaagagcttgagataataatgtagtgcttggcatgtgtgttaaccatctgcagtagcgaggtcatggtcttgcagtacttttcggaacttgattgaatgcgtcgcaaagccgatgctggctcaacgtcccacagaatgcgctcaagcaaatactctcgggtgccaataatttcttggctgagctcccaataccgacacacaaccggaaacactaactcaacaaagcttgagttgggatcaaatttaaccgaggcgatggctttagaaactttatccgtgcaatatgtacgaacaacctcatccggcgaaggaaaggtggtacgaggcgatcgtccgtgggagcaatatgcaaatgagatcgtgaaaattcacttagagcacggtccactgcatctgaatcgtctgcatgcgttgagaagctggcaccaccttgtacgccgaaatagtttgtctttgcacctgaataaagtgattgcaccaagcacggaagttgcgatacgcccgtggtaaaatctttatgcttcgactttagatgcctcgacattgtgtcttcaagtgggcagaagtatgcgcaatggagacatcgcacaccggattttatctcaattccgtctactcgctccaatagctcctgcgttggttttaaatacttgagaagggatcgaagttgtatctcgcgtacggctctacaagtcatgcgctatcccacaggagggccgatattacttctttgggccgtagtcctcacaccaggtttgccgacaccatcacgaaaaagactaaacgcttacgagtcgcttccagaccgcggcgtactcaccgaccacgatgtagcgtcggataggttcatccagacggccaggactctacggcaggggcagctggctgatggaggtgggccggagctgcacctgagatggccacctcggcaatctcgcgttacgaccgtgctagcgggcgcaccaacctccccgcccgtcgccaacacggttcgcgagggttaaacacgctggggacgcgtccgaggtggcggaggcaaccctggcgaccgtgtcagatatacccaatgaacctcgtgcggggtcattcgaccctggcgatgtctgtggggggaatgaaggccacccgcggcgatcgcacgtcgcttccggtctgcggcgtagcacaccatcagtggctacatgacccctagcgatggcaccaatggcacgttggcggtagattagagcggcaatggtatcggcatgactagacacatccgatgagccatcgcatgcagcctgcaaccgcgtgaaggcctcggtcccgattctcgccttgcccaccagcagcccaccaccagtggcaacacgacccctagcgatggcgccaatggctcgctggcggtagattagagcgcaaatggtatcgccacggcgcgccacgtcaacggagccaccccacgcagcctgcaaccatgcagaaggcatcggtcccgattctcgccttgcccaccagcagcccaccaccagtggctacacgacccctagcgatggcgccaatggctcgctggcggtagattagagcgcaaatggtatcgccacggcgcgccacgtcaacggagccaccccacgcagcttgcaaccgtgcagaaggcatcggtcccgattctcgccttgcccaccagcagcccaccaccagtggctagacgacccctagcgatggcgccaatggctcgctggcggtagattagagcgcaaatggtatcgccacggcgcgccacgtcaacggagccaccccacgcagcttgcaaccgtgcagaaggcatcggtcccgattctcgccttgcccaccagcagcccaccaccagtggctacacgacccctagcgatggcgccaatggctcgctggcggtagattagagcgcaaatggtatcgccacggcgcgccacgtcaacggagccaccccacgcagcctgcaaccatgcagaaggcatcggtcccgattctcgccttgcccaccagcagcccaccaccagtggctacacgacccctagcgatggcgccaatggctcgctggcggtagattagagcgcaaatggtatcgccacggcgcgccacgtcaacggagccaccccacgcagcctgcaaccatgcagaaggcatcggacccgattctcgccttgcccaccagcagcccaccaccagtggcaacacgacccctagcgatggcgccaatggctcgctggcggtgtattagagcgcaaatggtatcgccacggcgcgccacgtcaacggagccaccccacgcagcctgcaaccgtgcagaaggcctcggtcccgattctcgccttgcccaccagcagcccaccaccagtggctacacgacccctagcgatggcgccaatggctcgctggcggtgtattagaacgcaaatggtatcgccatggccagccacgtcgactgagccatcgcatgtagcctgcaaccatgcagaaggcatcggtcccgattctcgccttgcccaccagcagcccaccaccagtggctacacgacccctagcgatagcaccaatggcgcgtgggccgtacattagagcgcaaatggtatcgccacggcgcgccacgtcaacggagccaccccacgcagcctgcaaccgtgcagaaggcatcggtcccgattctcgccttggccaccagcagcccaccaccggtggcaacacgacccctagcgatggcgccaatggctcgttggcggtaaattagagcgcaaacggtatcgccatggccagacacacccggtgagccaccccgcgcagcctgcaaccgtgcagaaggcctcggtcccgattctcgccttgcccaccagcagcccaccaccagtggcaacacgacccctagcgatggcgccaatggctcgctggcggtagattagagcgcaaatggtatcgccacggcgcgccacgtcaacggagccaccccacgcagcctgcaaccgtgcagaaggcatcggtcccgattctcgccttgcccaccagcagcccaccagcagtggctacacgacccctagcgatagcaccaatggcgcgtggaccgtacattagagcgcaaatggtatcgccacggcgcgccacgtcaacggagccaccccacgcagcctgcaaccgtgcagaaggcatcggtcccgattctcgccttggccaccagcagcccaccaccagtggctacacgacccctagcgatggcgccaatggctcgctggcggtgtattagagcgcaaatggtatcgccacggcgcgccacgtcaacggagccaccccacgcagcctacaaccatgcagaaggcatcggtcccgattctcgccttgcccaccagcagcccaccagcagtggctacacgacccctagcgatggcgccaatgtctcgttggccgtaaattagagcgcaaagagtatcgccatgaccggacgcatcttgtaatgggcctacttttgctcactactttagcttccacgtgtgcgcgtgtatgtgaggaagcgtagcctagtttaacttagagttaaatatactcgggtctccgagtatagattaatctaaataaacgatccaaataatatttttgggttaaaatgagaactgctatttttgttttatgtttctgacttcctttaaatgtaatattctaagttgggaatctgccaacgactggttggcagcattcctacgctatgcatgtcgctcattggctaaaagatgctgctttcagccaataggaatcctaagtctctgtgaaccacccgtcgtggtgatcgtaaatgtatgcagcctttggtgtgtctacaccaaagtcgagaaagtctttcgaacctctaacaaacgtcgtgtctgttagagttacaagtgactgtagccacttgtgtgtgtaaccctgttacaccatccccccgtcaaggttagacgtgccgagtcacggcacgtcaatcgggaaattgaccattcgtcaatttttcacattgggagatagaaaactcgagctcattccgcaatgagctcgtctcagaagaagaccgccgccccaacagagggtaagctctctgtttctcagtaccatgagcgccagcaggcaaagcgcgatgtgctcgctgcaaaggccgcgtcagggacaacccagtcggagattgtcctcgaaggttcctctgtagtcaacgacgccgttgactacggggatgatgacgtggagatgggagagggcgaggcctcttccaacaagcgcaaggagtctatcgacagtgatagtctcgacccgcatgccgggtcgagacgccctcgtgaaggagacgattcggacgcttcaagctcgaagcgttcgcgcggcgaaagcgacactccgctcaccgctgctggggctttaagctccccgcgtaaggtgggtcttcaagttctccgcgcgctgctcaggcagcgcgcgatccgtggatgctgtctgcgtcatagatcgcagaccgtgtgggcaacaccgtgcctccaaatgaaatcccgctgtacgtatgcagcgggatccacgatgatgctgtggcggaggagcagcactttgatccgttaacgagtcaaaggcgcgattactatatcggactctttcaggagctccgatacttctccagccagaagacctcttctcgcagcaaagtgcctgagtggcaggcactttgtcaaagttggaatgctttcgttgagaacttcaacaagaagccggctgcttaccgtgagcgggttaagcatgcccgtgagcgcttcgagacattctcgacgcgcgggaggctggagcagctccacagatcctctgtggacgctggtattccatgcgctgtgcccgaaggccatcagtgcacgttgtgtcttccgggtgcgggtgcgcttgagcgaccgcgaccgcgacctaaacgggtacacgacgattcgtgtacctgagagtctcaaggatctccgtgccaagttcttagcacgcgaggaacgcgacgatcgtgggacctcgggcgctgtaggtgaccacagcgctcgcactaccttcgcgtcggcagcgcgtggtgagcttcgtacgccctcaccatttccggaacgtcctgcagcaggacgtcccatggctcccatgtatcttggtggggcggaaatcctctccaacgaatacgaaaacgaaccggttgccggttcgttttcgggatactatggtccacaatacgctcaacaatccagcgtgttgagccgcgggcgtcgcggatcggaggcggcggtggtgggaacacgccccgggtatgatcaacctgggattgaccttggcccgaccctcgaggagcgagtcgctgctgtggagcagcttcagatccgtgcgttcgccgctctgaagcaggagatggcgaccctgagagctcaagttgatcaggcctcgcagagcgcgtcggacatctctatcgacgtgggaggtcgcgtcgtgcgcttgtcccaacgtgttcacgcgctggagcagaggttcgcttccgctggggcttccgcttcgggccagccgagctaggtggctcgtgctgccggtatggcatcagccgcctaacgtaaaaggttggatggaggcgcatgctagatggaatatctagcatgtaggcgttgccatgttgtgccaacactgtgaacggcccgatgaagcgcggagcgagcttgctcgccccgaagtcggaaactgcatgtttaggcaggttttgagttactaacaaaaccaatgaatccttcttgaattcattagtgttgcccctaccaacattgtctgcgttcagcttctgtcagtcgacagaagctgcaatagcgtcttggacaaaccgaatgacggcttgtctgcgttgcacgaagttgattgcgtccgagctgaacgagttcagctcgtttctaccagtagacccggcctctgcgttggtcttcgcggtgtctgtggcctgcacagacccgttcttcttctgcttgctcttatcggcgtctgtgccctgcacaaacccgtgcttcttgttcttcttgcgcgtagttgcggctgacactgtgcaagtgtcagcggcattctgcggctgctgcgttgcagtcgtagatcccccccacttaaggaaggagccaccatcccgagtagactcgggaggcgtgggtgcctgatggcattcacgtagaacggtgtatgcccggtcgaggcatgcacggagttgttgatggcgaactccgccatcggcaggcagtcgctccagtgttggaacgagtgagcgtagctcttaagcacgtctacgagcacgcggttcacgcgctcggtctgcccgtccgtctgcggatggtccgcagtcgacatcgaaagttgactcccaagaagtgtaaacacttcttgccaaaggtgtgcagtgaagcgcgggtctcgatccgacacaatgtcgattggcatgccatggtgtttgagcaccatgtcaacgaacagacgagccgtctgtttcgcagtcacttcagcgggtaccgcagcaagatggtacatcttgctgaagcggtcagcaaagaccacaacgcccgtgttcccctggctgtccgggggaagaccgaacacgaagtccaaagacatggactgccaacactccgacggagtcggcagtgactgcaagggagcccgcgcgaaaggcgcaggcttcacatgttgacaaacctcgcaagcacggacgtacttgcgcacccatttatactggtgggcccagtagaagtcccgcgtgagaagaaggtatgttttctcacggcccgaatgccccgcagtcggtgcatcgtgatattcatacatgatcctgagtcgcaggtgggcacgacaacgcggtccgcgttgtcgtcgcctgcattgtagagtaataacccgtcgtgcacccggtaacggtgtgcacgagcacgaagatgcttcggcagcttctgacgagcattgtcagaaggtgctgagccataggccaacaagagcttcgcgtccgcgtcgtgcgcgtacgcggccttcccgtcgtccaacagtgacgacgttggggtgctcgatcgcatggcgtcaatggcattgacgttggcatcagtcgtggcgtagtcaggtcgacgcgagagcgcgtcggccaccacattgagtcttccgggtttatactcaacccggaagttatactctacgaagaatgagagccatctcgccatccgttgcgagatatgcggcgacttcacagccgtccgcagcgacgcgtggtccgtatagaccacgaacggtttgcttccgagtagatacacttggaacttcgcgagtgcgtacttcatggcaaggagctccttgtcatgtaccgggtagttgcgctcagctggcttcagctgacacgattggtagtagaccacacgatcacgaccctcgtgatcgtgctgcatcaacgcacatccgattgcgaagttggatgcgtcacacacaacttggaacgagcgatcttggtcggccaccgccaagatcagcgcctcagtcaagccccgcttgactgcatcgaaggcctgctgacactcagcagtccaaatccactcggcgtccttcttcaggagctgtgatagcgggtgtatcatgcccgcgtagtccttcacgtacttgcacaagtacgtggccaagccaaggaactgccgcagttccttgacgttcgacggcgtcagccactcattgatcactctgacctcctcagggtcagggcggacaccgttcttcccaacgagacacccgagcacgggtatctcgctcaccccgaagatgcacttcttcaggttcgcgtagagcttctgcttgcgctcatgcgcaagcagcttccggagatgcaccttgcgcatctcaacatcactcatcccgtctgcagcccggctgtggacgaacacatcgtcgaagtagctcggtgcgaagtcgcgcaccgagcgcaacaagtgcgtcacgcacctgttgaaggtcggaggggcgttcttcggcccctgcggcatcaccagccactcccagtgtatgccgctcggcgtgctcacagccgtgagagggatatcgctctcacgcatgaggatctgatagaatccatcgcgcagatcatgagcactgtagatagtgctcctggccatcgaatcgatgatgacatcttttcgaggtatcggcgtctgcgccggtatcgtcgcatcgttcagcttgttgtatgcatgaacgatgcgccaaccgcgctgtggcttcttggcacagaacgtcggagcactgtgcggggacttcgactcccgcacttgtccagctttgcgacgactttcgaagaagtcgtcgatcgctttgacctgctctcgcggcagtggtcaatgccgcgtgacacagtacttcgtccccggcacgagatcaatctcgtgctggatgcccttgtcctgcggaagctccgcagggatctcttccggaagcacgtccgcgtgctcccgtagaatctcgtagaagggactcgacttcagcgagtcccagctctgctcctcaaagcgttccttcttagtcttcgcactgagagtgtcctcacgctcagtggtgctctccatgaagagctgcctcagttcttcattctcgctcttcgttctctcggcgtccgagagaacgcatatttgctcgatgcgtccatcgtgcaagtcacgcgcgaagcgcttccagctcatgactggaagcgaagtcaactccgacgcttgcgtcggaggattagcgatagtcatctccctgtaccggacccggcacaggtacgtgtcaagacgttcaacgtctcgacgcctggcttctctgcctccgtctacccggcagacattccttgtagcgtctcggccccaggccgagacttgcgcagcgaccttcgcatgcgccgtcttcttgttctgcggagcccggctccgcttggttcttgacctcgtccaggcccagccgtggacgggtgttcttcttcagtaccgccggcgggtttatcccgcgggcgagcgacttcaagcccggctttgtcgcccggcgcttcgtcgttcacgacagcatgcaagttttttccggtgcgggacgtttgcaaccgtccgcaccgcttgcagcgtcgactcccggagtcgacacgccatccttacctcgacgccaaccattggcggagaccaccattacagagggtgcgtcggctcccggagccgacgaatcaaattcacctaagccatcgactcccggagtcgacggcgcctcgtcaccttggctcttattcgtggccaaaacggatccaatcagattcgcgtcagcctccacggctgaggcgtgtgatcatctgtgccccttgaggtcggagactctttctgattcgctgaaaagcgggtgttgatatccgagatcaacacattttctccttcagccgtcggcggcgacgccgacgcttgctgctcttgcgcgcgtgctcgcgcgcgcccagggcgctcggggacagcggcattagacgctgtctcgagtggggagtcgcgcgcacctgtcggtgcgtgcgtagcggcaacagggccatcgctcactgttccgctgtcgcgaccgaagcgcacgagagtgcgcttctcccaattgatgaccggatcattccgtgcaagcctcggcatgcctaatacgatgtcaaacttatcgtccagatccaggacgataaaggtctcgacaaactcttggtcttcatacgtgaagcgcacgcgtaccatgcgcttctgggtcttcacgacggcacccgttgccagtcgtacctccaacatacttcgaggtatctttagatcctcgaagtcaagcctcgatagacttcgcagtcgaacaaagttcttcgacgcgccagaatctaccaaagcgcgaagagagctgcttgctctcatcgagttcacgttcaggatgacaaggtcttgcttgtcatcttggttcttgcaccgagaatgaatctcactggggactgcagtcctcagtgtcgcgtgtccaaggtcgacacgcggaactgtattaccagtagggcgccccgcgcctactggcgtccagcgttttttgtttggttgcgacggtgcccggcaccggcgcgatagccaccctgctggtgcacgggggccgtgcactcccgagcaccgagaggtccatgggttcggggcctcccgtcctcactaccgggcgtggctgtggcctcggcacatgtgcaggcagcttagcctgccgcaggctaaactcctcctgcattgcaagagtgattgcagcttcgagagtactcaggtactcacggaagagattggtcttcacaggccaatctctcagtcccttcatgaacgtgacgaccttggtcgcctcgtcgatcggattggtcacgatgttccagaccaagtaccgtgctctctgagcgtaagcatggacatcatgcttgccctgctgcaggtcgaggaactccgccctcgaccggaactcgttttgcgggggctcaaacgcttgtctgagctcttccgtgaaaccctcgtacgtgctaaagcacgtaggatccgagagtcggcgtccatacgcccaacttcttgcacgtccgccaagacatgaaatggcgaacgcgaccttcgacaacgggtcgacgatacgtcgagccgcaatggcagtgtcgagttcgacaagccaacggaggaggggttcaccctctcttccgacatagttactcacattgagcttcagcgattgcgcgcgtgatgtcgtcccggacggcaccgcggtagtagcagcaacatcgcgttgctccttcaggatgaagcccagagcaacaccgtgttgctctgtcggcgttagcgtacgcagcatcgtagctacaaccgcctcaccaatgactgttgacagtcgttggagagcctcccactctggatccgacaggtggggacagtcagcgcgtgcaacgtgagttgcacgcatagtggagctttccatgggcacctctgtatccatgggaaggttctcagctccgcgttcgtgcggtgacgtacgaactcaggtagtcggtcgttggacggactacaaagtgctaccaggtgtaatgggcctactttggcccactactttagcttacacgtgtgcgcgtgtatgtgaggaagcgtagcctagtttaaattagagttaattatactcgggcctccgagtatagattaatctagataaacgatccaaataatatttttgggttaaaatgagaactgctatttttgttttatgtttctgacttcctctaaatgtaatattctaagataggaatctgccaacggctggttagcagaattccaatgctatgcatgtcgctcattggctaagagatgctgctctcagccaataggaatcctaagtctctatggaccacccgtcgtggtggtcgtaaatgtatgtagtctttggtctgtctacaccaaggtcgagaaagtctttcgaacctctaacagacgtcgtgactgttagagttacaagtgactgtagccgcttgtgtgtgtaaccctgttacacatctgatgagccatcgcatgcagcctgcaaccgcgtagaaggcctcggtcccgattctcgccttgcccaccagcagcgcctgttgggcgcattccggccgctgacgatagcaagatcggcttcgaggagccgacgcacagtcgcgcagctctagttacgtcatgatatagctaacgagcctagccatatggtcgcaaaccgtcggaaaggcccccacgattccctcctcttggttaccgactgtagcgcccgtagagcgcgttccgtcaccattggcctacatgtggtagcggctccgatgctgtcaaacgtgtccatagcggtttgcaggcttttgatacttggttgcaccgtggtagtatatgcgtcccgtgtatgtcacgaacgttcatctagggtccactttgccgaaaataacctaaattcaaattttcatggtggtaatttcggtaccccactttagtgatatgctactcatccaagaaaaatccggcaatttttagctattgaaaacttataaaaggtgaaattaatatttaaattaggcaagtaaatataagtttagagaggtatatagttgatctggctgtagcacctggaatttggggaccctaggttttcatcagcagggaattctattatacgacttatacgtgccagagaaaggtttaaatacaattaaaagctagcgtcaatgttattatggagccaatatgaagctacagagctgagatttagatagggtacgtttttgaccatgccaaactcacttttagcatgcaaacatatattttagatgatattaccagacaaccagaaccattattggtatagtatacagggagttgatatcaactccctgtattaccaggttttcgtatacgggggattcgatggtaccactcccgtgtaccagagacgggtcagtgatccattattcgatagctgctagtttcagccatacgaacgtaacattttgggagtcgaaagtttatctgtattgaacacaagtgtagtagattatgagaagtggtgtacataatcgtacatgtggaaaatgtggtagtatacatggtgtaagtataaggtgatgggtaacagtggtaacaaaccaaatgatctactttttagtcgataatagagcggtttcgaaaccattcacttgtcattcacttcctacttgatggtgaatggcaagtgcagttgaaagtcactgttctcgctttcgaaacattcttatcccttaaattaacaaatcccacattcttttttctgtcataaagtatggcaggtaggaagcgaactggtagcgcgtcgagcgtcgagcagggggatgcaacaccgtcctggctccgcgcttcactagctgctacagcggcgacgctgtcgggccgtaatacgatgcgtagcaggtctaagaaacattcgtgcaagtagaacacgcagtatttgtacggcagagctcacatgtatcgactaaacgttcgcgccgctagcgctggtagtaccagagtcgtagcgcttcgtctaactcgttcgctgctactggcgtttcctaaatggttgcgcggtctaagctgtaccgcaagctaagtgtgctcacacgagcttggagcaccgtcgcgcgtccgagtctagcgtgctgcccggacgccgacgcagcgctcgacacaaatgctcatcgacagcgcgtcaaaatgcataacggcggaaggtatgtagtacactcgaattaaaatggaaaggcacgcgttttgaggaatcgttcttttatctcgcccgaaaaaggtgactttcacgatcagattctttaacgagattgactttccgttaacggaagccgctgagacacgcgaatgggaattgaactgaaatttggtcgcttcgaaagcgctctaataaaccaaattatctactataatccaaaatatctactaaaatgtaatttgttttaggtatgctgaagtatatagttagaagtatattatagttcattatttatagtggagtgagtgattgcggaagatagtatggaatgtgtaaatgaggtggatatatgtggtagattggtgggtatgtggtgggaagtaagtgttttggttggggtgtgtggacaatgaagagggtagatggggatgttaagtggtggatatgaggttaaaaatggtaaacgcggtttgaaaaaaaaagtacagacaggatgtaaaaaaggagttgatagtttaatagagttagtttatgtcgaagtaggtttgacgtatgtaaatggggtatggggagtaggatagatgtggttgaatgatgggtataaggtaaaaagtagataatgaggttgagaaacgagagtggaggtggtggagaaaagtgggttgtaaatgaagaggagaattgtggtggttgaatatagttataaaaggtggaagtagatgtggattttgtaaatgagaaggtgaggattagtggtttagggtttagggtttagggtttagggtttagggtttagggtttagggtttagggtttagggtttagggtttagggtttagggtttagggtttagggtttagggtttagggtttagggtttagggtttagggtttagggtttagggtttagggtttagggtttagggtttagggtttagggtttagggtttagggtttagggtttagggtttagggtttagggtttagggtttagggtttagggtttagggtttagggtttagggtttagggtttagggtttagggtttagggtttagggtttagggtttagggtttagggtttagggtttagggtttagggtttagg
